United States Patent Application Publication US 2023/0414685 A1 - sequence listing, part 2

SEQ ID NO: 17 - DNA, 49785 bp, synthetic construct
  source 1..49785: mol_type = other DNA; note = Lactobacillus plantarum PDA6 - Contig 17
gtgatgctccaaatttaggaataaaacgccccgattaaagcaatgatgtcaaatatgtcagaaattaagactttagagtcctaatatacttgactttacgtagaaaacttcttgcttggtctattatacaggcaatttacttaatgaccaagctctcaacaactattagagcaattatcaatgatggaggggatttttttaatgaatgcactcatttttcatgggtcagcaccgcatgctacagcagacaagttttggtataaaaacattgctcatagtttaaactctttaggaatatcaacaattgtggcggatttaccaaatcttgatcaagaatcgctaacagatacactcgttaaaattagagaaatgaacttaggcattaatcaaaacacaattttaatcggccattctgccggaacaaatattatcttagctttacttgaacaactaacaaaaccagttaaagctgtctatttgattgctggctattgtcaacctaatggcatgcgtcacacaaccttaaaaaaatcctatgattggaagacaatcaagaagaactcaaatgagttttatatattcaattcatttaacgatcctttcaattgtaatgaaaagcaaggaagaagtttatttgaccatttgggtggaacacttattttaagaaatgatggtcattttacccaaaaaaagctgccattattaatgacgctactgcaacaatactaatccccccccctttagaaaagtatattaaacggccactagggtatatcctaatgactatttatacttagtgctatacttagttttataaacatccatagaattgtccaaaattgtaaggatgagttgcgctcagatcagttccaatgatccaaatgttagtaatgttgtcctaaaggtactgatatttggcataacgggtaagtattacctgaaaaattaggagggtattcatgaattttgatgctgtcggtgacaatgtaagaggtcttttaactgcgacaagatcttatgttgttcctagatttcaaagagatttttcttgggatgagaataattataaagagcttttaaatgacttattatcacaaataacatgtgacgacaataacggcgatgttatagaatttaaaacatctcaatattatttaggaaatatgattttcttaggcacaaaagataaaacatcggttgaaattattgatggtcagcaaagattaaccacagggacgattttattagctgccattcgtgattcgctatacgctgcctcaaaaaggaaagatgatctggctttcagttatgccgaaactacacaaaatgaatacttagtaaaaaagatagatggttctcctcaaagaaaattacaaactactagtagctatccttattttacacaaactatacaaggtggtgcagatagcgagacttctatggagccatcaaacgatgaagaagaagcacttaaaaaatcttttgaatttttcaaaaagcaactaagccaaaataaacttttcagtaagctaaacatagataagcctcacgtaaaaagtaaaaaagacgaattatttattaatactttgaaagctataagagatcagtttttaaactctgaaattgtcgaaatatttgttgcagacaacaatcaggcacatcggatatttgagaatattaattcaaaaggtaaaccattgtcacaagtggatttgataaaaaatgatatatttagtaaattagaaattaatgatgtaggtgtagattaccccactcaacagtggaaagagatcaatcttgtattatctgacctagacacaacatttgatgaatttttccttcacttttggaaatcagaatatccatctgattcggctaatggctctaatctatataaaaagtatttaataagatttaaaagtgatgatgaaaatcatatttcacttaaaaaatttgtgaaaaagttgcaggaatcagccaaaacgtacgcaaatataattaatccattaagagacgattttaaaaaacaagaaacaaaaattgtttaccaatccttagatgctataaataagttccggggtgtacagtcaagggttgcgttattatctctattcaatagtggtattaaagtgaaacagaagaagttaaataattttctgtttttcctggctaattttcatatggctgcttttggaacagatttaaaggtacgttctaatttaactactaataaatataaaagcttttgtcaaaaggtcaataatgctaaaacacccgaagatattcaaaaaagtatgttagctctcgaaaaatcattacttgatcttatcaatgaggatgatttcaaaaagtcttttgtaaaattagtgttccagaaagataaagcaagaaattcaatgagtagctatcctgcttcctatgctataaaggtaattgctgataaaatggatggcagacaatataatgatgatgactattcgatcgaacatatattagacgaagcaggtaaccgaaaatccttatcaaatattggaaatataagtgttttagaaagaaagtacaacgatgaattatgcaacattaagcctaaaaatttccataacaatattgattataagattgacacctataacgaaagttcttataaaatgatcaaaagcgtatccaaaggttttaacgaagaatctataccaaaacgggcacaaaaattagctgattacttttggaatgaatttttaaaaatagaatgagtgttttcccatggtgaagaccaatattcatgttgattattttagataagaaataggaaaagcagggttatatgtattgataaattatttaagatgaaagcggaacaaaaaaatactgacgaattagaagcaggtcgattttatagatgagcttttaacaggagaaaggcatgtgccacaacttaacagttgtggcctcttttttgatgctgtataattaaagggttagaaccgtgtcattacttaatgacataagtaaggagataaaaagatgaaatatggctatgcgcgggtcagtaccactgatcaaaaattagcaaatcaaattgagttactaaaattggcaggagcagaaaaaatctttcaggaaaagtttaccggcacaactactgaacgaccggagtttcaaaaactgttgcgcgttctaaaaacaggcgatactttgattgtcactaagttggatcggtttgcacggaacacgcgcgaggcattagccattatccaagagttgtttaaagaaaatgtcaaagttaatattttgaacatgggcttaattgataatacgccgactggccaattagtctttacaatatttagcgcctttgcgcagtttgaacgcgacatgattgtcacgcgcacacaagaaggtaaattgtatgccaagcaacatgatccgttgtttcgggaaggacgaccgaaaacgtattctgatgaacagatcaaatttgcttatgagttacgacaacaggggatgacttataagatgattgaacgaaagacggggattagtaaacgcacgcagcagcgacgatttaaattagttaaaaacaacatattttaaaactgtttacaccataccaaaaggggcttcgaatacgaggccccttttagatttagctattaatccgtattaaagttagtggctagctcccagttcaactttttaatggcttacgatctgtcaacaaagcaatcggcgacaggatcaaaacaatcatcgcgcctactaagtaggtatgactgaaggcctggctgatttgtcgattcttagtatgcttaatttttctcaaagctgtcattaaagcttctttttgtgccaattgtttgagacctactaacaattttttctgaccctggcttatttgctgattacccaaattaattttttgagaagctactgacagtttagatatagcggtattttgattttctaacttggttaaggtaagtgctagttgctggttacccgcttttaagttgtcagtagctagtgctaacttcttctgggcttggtagacctggtgcagatcggttcccttttggggctgtggtaaatcaacttgagatttggccgcttgtttaagggcacgtcttaggttcgtctgtttgtttttagttgttaatttggctgatccagtagcggaaaataggctattcaattgttgatgagccactttcttcactttgggtgataattgctgtcgatcaacaatttgaatggcatcttgatgaatatgctgcttagctgtattgacattattatcaaggaccgttactagaattgcaattcctaaacaggtgccaatttgacgcgctgcgttaacaattcccgaaccaatcccacttttattttttggcaaatgcttaaccgaggccactaacgaaaccgaagagaacccaaaaccaacaccgttaatcaccagaaaagtaatgataacagctttaggcgttgtggtggtgataaacgacaagagcagtaagctagctgccatgactaagaggccaatcaaagtaaccggaactgcgccaacttgatcaaataacttagttcccaaaggcatcgctaccatgattgttaaggaaactggaataataattagggctgcatgtaacgcagtatcgttcagaacgtcttgtaaaaaataatttaaaatcagggtggggctaactaacgcaaagccagttaaaaagtaaactaaactagaagcagttaaggttttttcacggaacaaatctaattcaagtagtgggtgtttgactttactttcgataaagatgaacaatccaatagctaatacgccaccaatgagtgttcctaagatgatgcccgattgccaaccatattggcggccttctagtaggccaaaggttaaaccacccaagcctagtgttaaaagaatcgttcctggtaaatcaattctccccgccaaggattcgtcatatgattcccttacccccatagctataattagaaaggctacaatggttaaggggacattaatgccgaatacccagcgccaagaagcatattcaataatcacgccaccaatcggtggccccccggcagcggctaaagccgttaccgcgcccacaacgctagcaattttggacatatgcgctttgccaaatatttcaattcccattggtaagacaatcggggtgataatggcaccgcctaatccttgaaaaaatcgaaaagcaatcaattctggtaacgacgttgccagcatacaagccgccgaaaagccaccaaataaggctaatcctaataacataatttttttacgaccataacgatcggcaatctttgaaccagtgatcataaacacggctaaggctaacgtatagatggtggcaacccaacttgtatcagttaaactggcattgaaatgggtcataattttgggtaaagcaatgttgacgatagtactgtctaaggtgcccataaacatcgcaatggttaacccgataaaactgataattttagtagcttttgacatctatcaagcgctcctttcggtaacagatgaacacaaaggaaacatttgttacctttgtttgcagtctttagtataattagtcctaaacattaaaacaatccttattggctaagtgctacagattgctataatttgttaccgatagtgtatgggaggacagcaaaatgaacggaaagcagcgtatggttgagcagtctaagcaatggttatgtgacgcccttataaatttaatgacggaagaaaattttcaggatatttctattactgaaattgcccaaaccgctgaattatcacgaaaaacgttctatcattcttttaaaaataaagaagcggttattaattacctgtgtgatcagttgttcgatcagtactttgaacaattgctccagcagaaaccgcaggtaggggaaatgatgctaaaaactacttttgacatttttttaaatttttggtggcaaaaacgagatctaattcaattattgatccaacaaggcttatttgatcatatgaatgaaatttggcagcaaaaagcaatcccccgttatcaacagtttgcggctccctggcatgttcagggcactcctacccaggtgaattatgtgatggcttttcaactaggtggttttaccaatattctacgtgtctggttaggccaagatcagcctgagccaccagaacaaattaaggatttaatgttattggctgcccaacaattagctgatagtttgaataaaaattagattagttagacagaaataatcaggatttagctaagattatgaataccattcaaaatgagggactaccctatatgtattaaatttgccgtctatgacgggacttgctgattctaatttacggcaactgatgacgaaccttattattgaactatagtaagtaccaggctgaaagagcgtaagcggattattaaccggcatcaacagggcattgtcctggctaaccagcagggaaaatatcatggtcgtaaacagcaatataatgaagatgatccccgtttaaaacacgcctttaactttatcaaccaggcatgagtgacatagacgttgcccgtaataccgaaacgaaacagctaataaaagcaggtattacaaatgtaatacctgcttattttttcctactactgtcaacacgatcacctaagattccaactaatacgccaacaaccagaatataaccaactaaatcatgatatggaaaatcgtagtgattacttgcccacagtatgattaaaagaattacaactagggttgtgcgaagccaaaagctttttctcatactatttggctgccagtggtaatttaaagatgataaaagtcgatacagcgtaaataattaaaatcggaatcagtaacattccataggtgatgggccacgtcaaaatggtcattaaggcagtgccaacggtatttaaaattactaacgttttcctggttagtttaaatgaatgccacattaaaaaccaccagtagaccaatgagataagcagtacaaaacttcccaattcagttaatgacaatttatattcctcctagacgttgcttatttgtattagcactatggaacatattttagacaggctctctaaattaatacgttttgattttataaacgccaaaacgattaatgtccatataaagtttactatgcgggtgagcatctctcatattagtcaggtgatctgctatattgctaaaatagacagaaagggtaactccgactggtggagatacaagtgatccaaattcagcaatagcttgaccatttttgaattctgctatctctttatttactgctgtcttattgcgcatatacaccctaataccccaccaaaaatgtttaatagttggatttgatgaagacttggccaatactacaccgaatactgcacttgttgaagctccatatgtcttatcattagtcttgatagtatagccgttgcttttaatgtcagcattgacttgtgaaagctcatcttctatttctgtaaccacgctttgagagacattattattttcagggagctgtaatacgtattgattattaacaacttttacatatggatcaatttgattaatttgattctcagtcaattgattattttctgaatctgataattttgctgtttcagttgtttgaccagcatcctttatgacattagtttgttttaactgggtagtatctgcagaagccctgcttgttggtatatatgtggcagttaaaattgcacttgccaatagaactaaccctaattttctgtttttcattgttcatcgacctcctaaagtagcaaaatcttagtctacgaattatataaaaatatttacaagcaaaccataagtcttatttttagtattttcaattataatactcatacgcgtggtgctagttaaatttagacagtaaaaaagcctgacggtttacacttaaagcaatacacagtaaagaggtgttaagcatatcagactagtttaagccttatcagccgggaatgagtgatgttgatattgccgaagtacgtgattaagccggccaaagccgttacgttaattatttaataaattgtttatttatttgcctaataatgatataattaagctagatgaaggaggtatcgagatgaagattattacttttactgctatcaagggtggtgttggtaaaacaaccttgactttaaattatggtgattggttagccaaacatggtaagaaggttctattaatcgatttagaccatcagtgcaatttaacaaccgtttttgaaaagacacgacgaaacaataccatcgctgaagcgtttaaagaaaatgacaatgctcaaaaagtaaaaattgacagtgtcggaccgaatctagatttaatagccggttttatagacctagatgttttaggaagttatctagaaaataacagtaacaaagaaatgatgttgttcatgtggtttaaaaacaactccgattcattaagcttaaccgactatgactatatcttaattgatacgcacccagattttagcaccatcactaaaaacgctattgctatcagtaattacctgcttagtcccattacacccagtgaacatggctacaatgccaagtttgacctagaaacacgactcgaaaaattcagaaaatcactttttgattatcgaactggcgaaacttacgttgacgcaaagcttttctttattggtaatatgattagacataatacaagcatgtctcgcgatttgctaaaacacatagaaggcgatgaaacagtcgcaactataattcctgaaagagagctctttaataaagctactgcaaggcacgcttcaatatttgaattagccaatcatgatgaatccattttaaagcaaaatcaaaagttcatagaacacgccgatcatctttttcaagaattagcaaataaaaccaagtaaggagagttagattatgagtttagattcattcaatcataaaaaagacgaagaaatgagagaaagttacgaaactacattgaaagacaacaagaaagatgcagtcgcatttttgaaaaatatcagccgaaaggaagtagagcgtaagcgatcagtgaccttctcaattactgaaagtcaacttaaaaaaatggatacggctgcccgaaaaaacggatttaaaaatcgttcagaattcttagcttcaatcatagatgcaatttagcaattaaataaataattaatcaaacaagtaaatacacaatttattttcttgattaatttgcgcttaggtaaaagctagtaaagtgcactgaaccaaatacggttgcctgtaagtaagcgctatgctagactaagattaatttaacaaccaaataaagagatcaagctaaacagaaaaatccccgattcacgaggaatcggggattttaggtttagcaagtagctaacagagagctacttagattcagacaatttagaccgccaagttaaaatcgtctgaacattgttcttaatttgtaggttaattataccgcaaaccagtcctatgggacaagtgaaggatagttaaaaacaaattaaatccaatggactaagtagctaaccaatgctatttagtccatttttgttgttagaaattaaaaaaagttgccgtataggcaacccagaatagacacatgccggtgaatttacaaagccgatcacgtccaatgttcgctttgtaattcagttaaagcatatcagatttgtattttaaaacaagtcaggtgttttagcaactctcttttaagacggcgtgtgtcagttaagaaagggagcttttattatggatcaatcaaactttaactttacaaatgctaaaagagcctatgaagtaaagttctacgctttgccgcagatcttactccaaggagaaaaatataaggatcttagcgatagtgccattttactttattcggtgttacgcgatcgtctaagttactcactaagcaataattgggttgacgaaaataacaacgtatatttcatatacacaaacaatgaactaaaagatttacgaaactggtcaaataataaaatcaataagattaaacacgaattaatggacgcaaaccttttgtatcaaaaacatatgggttttaatccaagatcaggcaaaaacgaaccaaatagattatatttggcagatttggaagtaacagcaaaagacgtttatattaagcgagagccaataaaatcgcctgaatcccttggtacaagcggacttctcaaaaagagaaacccgtatgataccgttgaaccccttggtacaagcggacttctcaaaaagagaaacccgcatgataccgtttctgatacgcctgaatcccttggtacaagcggacttctcaaaaagagacaagatctagactatactaataatttagatactaatagatataatatagatactcaaaagttggacttttccacagcccaattctcaccagcagaactagaaaagcaaaacaaggatttggtgaaacatgctaatgatttcttaactgatgaagatagtggcttaccggttttcttagaaccagaagccgtgcaattacttagcttctggtgccgtaccccacaacaaatgcgtcgcttcatcggcattatcttaaatgctaagtaccgagttgagaaggatcatcaggatattggggtcctaatcccacttgatgatgaggagctgaaacctttaatgaccaaagccttgagacgctactttaacgctcttagaagcaatgagaagcacattaataacgttgaaaactacttgtacggcaccatgcacaacctatttggggtttggtggaataaacaagcggctagagaatatgcggccaaccaccccgaagagcaaaacgttgacaatgagcgcttttagaattaaacggtatataagctcatctaagccgttttaagtgttcggcacataattatattaaaaccgatttaaaaccgtttagaagctaaaataggcgccttaaatagctgaataggcgataactaatctagaaagatgggaaaggagttttttaaatgaccaaaccaagcaaagaagtcgaaaaaatagagcaattgttggctgacccctggacagtcaatatttaaggcatttgggaacaagcggaacataatccagaccctgataagcgcaagttgtttgacgcgttacacacttacctcttagataaacggcaagaaaaaaattatcaacgaaaagcatttcgtgatttaacatggacgagtcaaagaatcagtggttggaatgaaaaggaggcacaaaatatgactaagacacaagcatatatggacaagtatcaatttacagttgcagaaaacaaacggtttgctcgaacaaattttaccaagctagtacacactagtgcccgctttgaaggcgtaaataccactttgccgcaaacacaaaccattatggacggcatgagtgtggcaggcgttcctgttgaagatattttgacaattgttaacttaaagcgtgggtggcaatatatcactgatcaaaattcctccttaacgttaaccatggaaaaacaaattaacaagattgtggccgcggaagacgccttagtaccaggagaattacggcaaggaaaaggaggagttgatttaggcagtgaagacttttttgaaccacccttaattaacgaaaaacaagaacaatcctttttacaaaaaattttggctgatccgcaaacaacgaccactgataaagcattgactgttatgtatcataatatgcgccaacaaatcttttgggacgggaacaaaaggacggcgactttaagtgctaataaaattatgattgacggtggtgcaggcttaatcaatgtgccgttagataagtgggatcaatggaacgaactaattgccaattattatcgaactaatgacatggctaaaattaaacggtggacatatgacaatggcattcaaggattacaaattagagcaaacttagagcttaaatcagttgaagacgaaattggtaaaagaatccaagaacaattaaaagattttgcggatcaaaacccagaaattaagccaaaaaatgatccagaaaataaaaacgatcggcctagttattaggttgatcgtttttgagtttattcggtttatgggcattaatgtaatcggcaaatatttttaaaagctcttcggtttgttcaaccgaaaggttatcagcttgaaagtatttttccagcaaagctcctttttgaattaatcggcgagaacgagctttgcagtcttgccgactttcataatatttagattgccgtaatttaaaatcttcccgctcaattttttgttttaaacgcgcttgttgttcaactagtttttcatattgattaggcatagtcattaccacctaactattattggttattttgatcttgatttaaaaaggcggcaatttttttagcaatcattttaatttgtggagtggtcagtgttgcataattcaaattagatgatttaatgatttccttaccaaggctttgttcaattttgcttttttcagctttaatcttttgattaagctgttttaatttagcttcttgtttttctaagttactttgagtcacaattatccctccaatcatcttaaaataatcaccgacactatatcataagggaaacgctaagtcaaagtataagagttgaaatagcgaagcggaaggcatacactaaaagtaaattcaggagaatcagcagaccgagtgaaacgaggtcaatgcgcacttacacgtcatcaaagatgacgttgtgctaaacccattaaaacatgtattagaagtcgccgatggcgacaacaaagtcaaacccataaacccaaagaaaggtggtgaccgacatggcaatttttcacatgagttttagtaatattagtgctggtaaaggacgaagtgcgattgccagtgccgcttatcgaagtggtgaaaagctatttgatgataaggaaggtcgccactatttttatgcccgctcggttatgccagaaagctttattttaacccccaaaaatgcaccagaatgggccagtgatcgagagcagttgtggaatgaagttgaaacgaaagatcgtaaatcaaactcacggtatgcaaaagagtttaacgtggctttaccggtagaattaagtgaatccgaacagaaagaattactgacaaaatatgtgcaagaaaattttgttgatgagggcatggtagccgacgtggcaattcatcgcgaccacccagataatccgcacgctcatgtgatgttaaccaatcgcccatttaaccccgatggtacttggggacagaaaacaaaaaccgaatacattttagatagtcatggtaataaaactaagacccctgcagggaatgtaagaaaccgaaaaatttggttggttgattgggataaaaaagaaaaactaactgaatggcggcacaattgggcggttagtgtcaatcaagttttagagcaaaaaaatattcccaatcggatcagcgaaaaatcctttgaaaatcaaggaatagatgaagttccaactcaacatgagggaatcaatagtaagcggcatgaaagaaaagaatttaatcaacaagttaaggactatcgcaaggccaaagccagttataaaaataaccaagaaaaagcaatcaatagaggtcatttagatagcctaagtaaacacttctcgtttaatgaaaaacgggtagttaaagagctaagccatgaactgaaaacttatatcagtttggagaacttagatgataagcggcgcatgctatttaattggaaaaacagcaccttaattaaacatgcggttggtgaagatgttactaaacaattattgacaattaaccaacaagaaagctcactcaaaaaagcagatgaactcttaaataaagtggttgatcgcacggctaaaaaactttatccagagcttaattttgaacagaccacgcaagctgaaagacgagaattaattaaggaaaccgatagcgaacaaacagttttcaagggtagtgaattaaacgaacgtttaatgaacattcgtgatgatttgttgacccaacaattattgacctttaccaaacggccatacgttggctggcagttattaatacaacaagaaaaggaagtcaaaatcgagcttaaatatacgctgatgattcatgatgataacttagaaagtctagaacacgtcgatcaagggttactagagaaatattcaccaaccgaacagcaaaagattactcgcgcagtcaaagatttgcgaacaatcatggctgttaagcaagttattcaaacgcaataccatgaagtattgaaaagggcctttcccaaaggcgatttagatggattgccattgactaaacaggaacaggcttatacagccgtgatgtactatgatccaactttaaagccattaaaagtcgaaacaatggaacaatggcaatcaaatccaccacaggtgttcagtacccaagaacatcaattagggttagcttatttgtcgggacagcttagcttagatcagttagaaaatcatcacttacaacgggttttaaagcatgatggcactaaacaactcttttttggcgaatgcaaagtcgatccaacgattaagaacagtcaaatcgagaaaatccaaaagcagttaagagagcaacaagataaggacgatcaataccgaaaagaaaatatcgggcattatcaaccactgaactacaagccagttagtccagactattacttaaagacggcctttagtaacgcaatcatgaccgccctatatgcccgtgatgaagattaccaacggcaaaaacaggcgcaaggtttaaaggagactgagtgggaaatgacgaaaaagcaccggcaacaccaaactcgaaaccggcatgaagatggggggatgcacttgtaatcaaaatgtaaaattgaatggtatcaatgcacctatttatttgctaaactaaaaataaaataaagaaaggagaatccgcatgtggcaaacaaacaaaaatggcatagtctagcacaagcaagtcgtgaattaggacatgggcgcaactatgttagtgcttggttgagcagacatagagaagaattcccagaagaattaatgcttggttctgggaaaagcaagttaatatctgatgaaggcatagagtggattaagaagcacataaaaaaagagggcgtcctcgtcagcagtagagttgctaacggggatcagcacctagaaccgcaacttctaggtgtcaccctcctaacaatccattttaccgggcgggctgggggaaagctagttgtttaatatttctagcccagcaaaccacataaggaggtgactcaatgaaagtagaaagctggcaaggcattaatggcaagctagttcatgatgatcaaaaggcgattgtggttgataatgaccaagcattaaccgatcaaaaacagctacaagcaattttagatcaagacggccagccaatcgacgaagctcgccgagccatgattaagaagatggttaaacgtcagctaaaaacgccgccattaaaacttaggggctggtttaatcgccatcaagacagtcaaaatgctaaaaagtccgaaaaattggtgagtgacaaaccgacccatcaatataagcagatcagaaatgaaatgaccttttttggtgagagtttcctagaaggtttcttaggcttctatggcttagaagttgataacgccttagtccgttatgaacataacttgcatgtcctagagacccaagagttaggccagtcagaaaaagagtattacttagccacgagtgaaaatggccacgtcagattagccaccgacccattaccaagccagcaaattgccgaggaacaattgaacaagttctatcagcgtgagccagaagaaacgcaggcagaacaaattcaattacgaacatcagaagactataggaaggaggaataacatgtcaaaatacagaaaaatgaaagcgctagcaactactggagccaccacaatttacttgggcttgatgaacgcccaagttgtctttgccgcagacggtggcgaagttaaaagtaagctcacccaagctgggaagacgattcaaggtattttaaccgggttggtcgttttagtcgggatttgtgtcgcgctatttattattatcaaaagaatgcctgacgcagacgatccgcgagagaaatcagaggtttaccacgcggttggtcgagtagctggtttagttgccttggcggcggccattatctggctactaccttgggtttacagcctattcacttaatttaaaaaggagcctgccaaatgaagaaaggaaaagaatttatcttcccagagaacgtagataaagattacgggatctggaaagactacaccttgaaggattttggctatgcggcgctggtaggactagtgggcttaatttttattgcaatcccaccctatggtctgatcttagtcctgataaaaatagtgattgttgtcttagccatgacgattgtcatggctattttaacaattcggccagttgcggcgcggaagaatattaaagtgcgggatagctttaagctgaaacgccgctatgccaatggtcagaagctgttctatttaaaaccgaagaagcgaggtgaactaaatgcgtttgaaaaagagcaaaaccgccaataaatcagtaaagctcgattgggattaccaaccgcctaaaatcaatggtggcaaagagaccattgatgacatgagcttggtggtgggtatgtatggtaactatgaagttaccaaaacaggtaatctcgttggcattttggaagttagcgggatcaaccttgatttacttaatgaaaccgaacaacaggacgtttttgaggactatggcgcctttctcatgagtaccttaggtgaaggcgttgatgacaccttacagttcttagagccgacaattcccgtcaatatgacagcttatctcaatggtctcaaacggcggtatctcgccttacaaaaaggccacccggagcaacagttcaaagtccagctcatagccagttacttggatcactttactaaagtccaagaatccaaaaacatgacaactaagcaacatctgctaatcgttaaggtaccgattaaagacaagagcgttaaaagcttaaaattagccgtcactcatttagacgaaaagatcgaacaggttaaacgagacattgaaaatgcgttaacggattttgatgtgacggccaaagttttgactagtcaagaagtccaagagattttaaagaacttgatcaattttaatggatagggggaaacaggatgagttttggtgataaggtcattgatttatttatgccaactaaaaaagaaagacatcaaggcaacagcgaccaaacgggtagtaagcccaaaccggaggttgaggattttaccaagctgattgatcgcgatagcttgcattcactatttccgttcagctgggaacagtaccccacctacgtccagtcgggcgagaattttattcgggtgttagcgatcgctgactatcccaagcgggtgtatggcaactggttatcagaattaaagcgtaaaaaaggcgttatcgatattgtgcaatatatcgacagcgctagtaataattcaatgattacctattacaagaagacgattcaaaataaggaagcgcagaagttaaatacgttcgacccgtataaaaagaagattctgcaaaattatattgattcagccaacatgcaactagataaatacctcgataattctaccacatttgtgtaccaacatatgctgatttatctgcgggccaacaatttagcagacttagatgacttaaccgaaagcgttaagaatacgttgattaaactacaaatgaagcccttagtgcccgttaaagcgactttccaagcattttggtcaaccatgccaattaacgagaacctcatgggggattacacctataaagagagtaataccgaagttgccagcagtatgtttccttttgatgacgctgaaattctggacttaaaaccgagaagcgatattgaaggagttaacaaagataccaacagcttaattgccgtagatatgttggatcgcaacaagaccctaaatcaaaatcaagtgattatcgggacctcgggggtcggcaagaccacctatatgatccaaaaaatcctacgctacgccattcaagactatcaactctacattattgatccagaaaatgaatataccaaaattgtcgaagccctaggtggggcagtcttgcacctaacttctaatgctaagtacaaaattaacccgctacaaatcttttccgaagaaatcttaagcgccgatgaagcggtcacaaaccttgatttactagttaaagataaaatccagcgattaaaggggttctttgaagttcttaaaactgggattacccaagttgaactggcaatccttgatgatgtcgttaaacaagcctacgtcaacagtggcgttttgaaatatagccgcttaaaagaaattaaagacgatcagtggccgaccttatccaatgtttatgacgagttggaaaaattggcagataaggacgccgacaaattcaatcgggtcaaagacttctactacatcttaggcagttatacccatggttctaacagtttatttgacggccataccaacgttaacttaaaagggaaaatcatttcctttgatttaaaaccgctacaaagtgagcaggaagtccaatcagccgcctatctgaatactttccagtatctatgggacgaaattaccaaagatcggcatagccgcaagaaattgtttgtcgatgaatttcatttcttgaccttgcacaaagccgccgccacctttttccaccaagcctacaagcggtttagaaagtataatgctggggcgattgccggaacgcagcaaattcaagatgtgattgaaggaacaacagatactgggcagaacattggggaagccattattgggaactcctataccaaagtgttctttggccttgacggtaaaggcgttgatgatgtgattaccaaattgcgtatgacgttctcggataaagaaaagaagctactagaacgtcgtagacaaggcgaagccctgatgatctatggtagccaacgtgcctttatgcgcgtcgagttgaccgaagaagaattgcggttaattgatcccgaagcttaccaggaaaaatataaccgtgagaccgccaaccaaccggattatcaaaagcgcgtggtgttgacgccaagtgaaattgacgctttgaccaccaccgaagaggaaggggggactttaaatgagtaaatcaaaccaactattaaatatcgaggttgggacattcaaacggcaaggaaacaagttgatcctagagcttaatcacaatcaatttcgatatgaccagttgagtgagctaaacgaattaaagcaagctgatgccaatttcttgcagttggttaacgtggttgagcaagaccaaaaggtcgttttaacttataccttgccagataaggtcagatcattaaaggaattaccacatgaaaataaagcaatccggtcagcgattgccaaggaaatcatggcgcaacatgtggttaacgatagccagtatcacgttgcgttgaacccagctaacctgtggtattacccaatgcaacatgtttggtacgcctatcgcgccaatgaactcatgccttatgatgacaagcacagcaatttagctaaatacaaagcgctgattctattttgtttgacggggacaccctatgaacggctactaagcaatcctaaagaagccctagctaaacacccggacgactatttacaacaagtagctaaagctacgtcgttaaatgagttaacggaagtggttaacggcattgaggactttgtgagctatcacgaatggcaggaagttgaaacagcccagcagaaaaccaaacaacgtttatggttgagcgtggccggagtggcgattgtggccgttttggccgtcggcttagtccataaaagtgacgaaagaaagtatcaaagcttagctaaccagaaccaagcccaggtcacgcgattaaaatatagcggccaaattcaaactgctttaaatgatcggaagtggtcggaagcgcaaaaagatatgcaacgggccggctaccctgcaactaagcaagtcagtgtctttttaaagcatggtcagtaccagcaagctttaaaggttggcccaagccagttgaataaggttgtcaacacggcttatgccaacaaggatagcgggcaggttgccaagtgggaattgccaactaaggcgacaagcaagcaaaaagaccaattggcgctggaaaaagccatcgttaactacgacaccaatacgctcaataaccaattatcctttacgacgaacgctgatgttttattgagaatgggccaagccttcctagcccataacgatacgcaagacgcccagaccgtccaaacaaaattagctggggtgaacagccctaaagccaagtatctcaaagcgctattaagtctcaaagctgctaagaatgaagttagcgacgcccaaaagaagttagatgacgccaacaagattgatggcagtaaagataaggataaagacaagaaggtggattcggttaaggctgatctaaagaatgcgcagagcgaccaatcggcagcgcaaaaacaagttgatcaggccaagcacaaagtgggtgattaaatgcaggtattgtcgtttgaatataagaaaaagaagtggaagttgattgcttatattgtgggcggtgccattctgctaatcatcttgctgattgccgcggttactggtcagctacaagaaaacagttgtgataactcaaccaccacagagacgcaattagatagtaagagcatgacagaaaatgccaaaaatatctatgcgcactggaaacaaaaatatggtgcgaccccacaagcggccgccggtatcttgggggtcttacaactagaaagtcgccttgatcccaagtccgttaattccagttccggggccacgggcttagcccagtggttaggtggtcgaaaagataaactggaagatttagcccataaagaaaacaaaccagcgaccaatctcggggttcagttggactatctcgatcaagaattggacagtagttactatgcgtcaaacaagcagatctttaaatatacggacgtgcacaaagcgacgaaagcatggttaatggattatgaaggcatgagcaaaaacccggaacaatggtatttaagccaaagatacggttatgccgatcattggtattccgtgttcgggacgagtgatcccgtggccggtaatacgttagacaatgcaagttccggcgatctgaccgagttaggttgtgatagtgacccgagctattccggtggcagcattgttaaaaacgcggaaagtatgaagggcgacttctattatgttcaaacccaccctagccccgatttaggtagcgatttaaagaatcctaacaaaaccggtgggacagattgttcaggctttgtctggttagcgcttaataaagctggttacaaggtaccggataacatgggctggtttaccggcacgatggccagtgacgccaaaggtagccatcaatacttgaaacagatcagtgaaactgacgcgaaagccggcgatattgtgattgttaatcaaggcgccggggccggaaacaacgggcatatcgccattctattagataaatggcaaggtaaagccaccaagattattgagcaaggtggtacgggtgataaagttaacgaaagcacttttggggcagctttttatagcttactaaatggtggtgatataacgttagcccggccaatcaagaagtaaggagggaaaacaaatgaagcggagcatagttttaagtgtggtgattggcagcttgatcttagttatgtcattaggggcaaatgcctatcaacatagccaagttaagcaggcgcaacagcagattagtcgtctacaaaaacagaagcgccaagttaaccagcaattgactaaagccaaccaacaaaagcagttattgagcacccaaattgacagttataagacctaccaaaataataaagacaaaagtcaggctgaacttagctttaatacggtggtcaccaagttctttgaggtcatgaacaactttaagcccaagacctacggccagcgtaaagatggcgtgaaaggcttgatttccgacaagctatatcagcaatacttttcaaataaaggaacatatggtgatagcaatagtgtttcagctaagttaaaccaactgaacctgtatacgcaaagcaagcaggggcaaagcatgaaaggtttggcggttgttagctaccaaagtaagagtggcgacaacgactggcagaaggcaacggtactttatcaggtgactttcgataccaccacggatcgaatcactgcagtacaaaatttaggaagcagttttaaagccagtgaccttaattaagcgggttggtaaagccctagcgataatcgtggtggttttagccgttggcgggtttgccagtcatcaatatgtcaaccacgtagaaaagcagcgaccaatcgtgactttagctaagcaccctaaaaaagtgttgttcttctatcgcgatgattgcccggattgccaagctatttttcaccgaatctattggcacaacgtcattagccataacgttgtttttattaacatgaatcaatcgcagaatcggcattacattcagcaatatcaattaacgtcagtcccaaccttgatccatggcaagcaacggtacaccggcactaaccaaaaaaggattaaacagatagtaggtgattagatgaaagacaaattattaaacagcattaaagctagttggccgtatttactaacactaatctttggcttgtatttagcggagattttagctggctctgtcatggccttgtcgcgctataaactaacttttgcggatcatatgccaacggtgttaaaacaattagctttacacccctggcattattacaacttgtatttgggccaaaagaacccagtactaattattgtcagtgtcgccgtgatcctatacaccatctattttgccttgaaacgaagtagcaaacataaagcttgggaaactgcggacactgaaacccacgggagtgcgacctggggtgatctaaaagagttgagtgaccattactttagtatcaatgctaaagacctcaccacagcgtttaacaggagcactacaacagaaatattagaggcattaacaaaacaagaaacacaatccaagacagacaagtgaaaggaagtaagaagcatgaacagaccagatttattagtacgaatagttacgatcatcacgttgttaattgcaatagttttgtttctatttcagggttggaacacacctacttttgtatttacagttatcacagtcattttatctttcatttatcagttaatcagaatacagatgaaaaagaagtaaatcagaaaagtcatctaaagctaaccacattggaggtaaacgcatgaatgggacaattttaggaatcgtagataaacagattgtttaccaaaataacagtaccaaacccaatcggaatatctttgtggttgggggcccaggatcgtataagacccaatcagtcgtgattaccaacctgtttaacgagacagagaacagcattgttgtgaccgatcccaagggggaattatacgaaaagacggccggaatcaaactggcccagggttatcaagtacatgtcgtcaactttgccaatatggctcacagtgatcgctacaatccttttgattatattcaacgggatattcaagctgaaaccgtggcaacaaagatcgtgcaaagtgaaaatgccgaaggcaaaaaagacgtatggttcagtacccagcggcaacttttgaaagcattgatcctatttgtgatgaaccaccgtgcgcccgaccaaaggaacttggccggtgtaacgcaagtcttacaagaaaacgatgtggaggccgaggaaaagggcgcagatagtccgttagataccttgtttcttgatttaaccatgactgatccagcgagacgcgcttatgagttagggttcaaaaaggccaaaggcgaaatgaaggccagtattattgaaagcttgttggcgaccatctcgaagttcgttgacaaagaagtggctgattttaccagcttttcggattttgatttaaaagagattggcaacgacaaagttgtgctgtacgtgattatccccgtcatggataacacttatgaaagcttcatcaatctgtttttctcacaattatttgatgaattatataaattagcggccgatcatcacgctaaattgccccaccaagtcgattttatccttgatgaatttgtcaatttagggaagtttcccaagtatgaggagttcttagcgacgtgtcggggatatggcattggtgtgacgaccatttgtcagaccttaacccaactacaagccttgtatggcaaggataaggccgagagtatcttaggtaaccatgccgttaaactttgcttaaatgccgctaatgacgtgaccgctaaatactttagtgatctgttaggaaaatcaaccgtaaaagtggaaaccggtagtgagagtaccagtcatagcaaggaagaaagccacagcaagagcgatagttacagctatacgagccgttcgctcatgacgcccgatgaaattatgcgtatgcccgaagatcagagcttattaatctttagtaatgcccgaccagtcaaagctacaaaagcgttccagtttaaactatttccgggggctgatcatttggttaacttgtcacagaacgattatcaaggccaaccagaagccagccaggaaaccaactttaagaataaagtagaaaaatggaaagcaaaattaaaggagactgctcaaaaagaagtcgcaaacaagatgtctcagaaagaggaggagcaacaacaggacaacctagacagcgatttagagagagtttcaaataaagatagtcaaacagaggcgccagaagaagacgacaacaacttatttggataatggagggcatattaatgaaaaaatatcgcaaatatataatcgccgtgatgacagtgttactgattgttgttggtcttaccgcttgtgggaagtctacagcacaagatttgcaaagccatcagtggacatttgcttctagcaaagataatggtatggccgctactgcaaagttttcaaaaagcaacttaacacttacccaagcgggctttagcgaagtttatacttacaagttgattgaaaacaagggcaatgaacaaattaagttcattggtaaaaatagtgtttcaggtagcacagaaacacgtttgtttaagattaaaaagcagtcagacaaatataaactaacaccaattaacacactggctaaaagtgatactggtacggtctcactcattcccaaatagacaaaggaggattttaaaatgacagaaattattcaatcagctatttcacactttttcgaatggctactgtctggtttgttagatggtttattcaacatctgtaaggcaatcattgaccaagccaatcaaagcttgccgattgttaaaacgtggtatgccatcttcctgtcctttgcgacatcgttagtcgttgtggttgtccttgggcgtattgtgatgacaattataaaagaggcggacgaaagtaccgatgtgacttgggctaatatcatcatggacgggattaaatcagcggccgtgatcccggtcttcgtgttcttacagggctttattcaaggttcaattaccttgcccctgctaaagtatatgtttagttctgatcagcagttcactgctaaatcaattaccggcatgaataaagttcctgggttaaaagatgttggcatttcgctacctttacagattttgtttctgctaatcttcactgtcgtaaccgtcgtgttctttatcaaaatgtgtgtgtttgtggctgatatggcgtggtataacctgacaattcctttagctgcaatgagtatggcgaccgaaagctttgattacagtggcacgtggtggaagaagtacatttattacaatgcttctattattagccaggtgctttgtatgtcactatcagtatggtgtttcactaatatggctaaatacgggtttattgcttttattgcttcaatcggattcggctttctggtggtcaaaacgcctgacgcggttaaagacttttgggcttcaaccggtgtgactaagagtgctggtatgggtgccatgagaatgtttcaaaattatttccgtaaccactaggaggaaaaatagttatgaagaaaatcgcacactggctattggaaaaagccaaaaaagatatgcgaactgacccttttacaacaccttcccggcggactaagttgtcttactattttgataacttagttagcatgatcttctatttaatgggaacttacctcatgttaatggatttataccaagagcttttcacggcgaaccataccgattttttaggaactgcgctaatggccttagttttactgctgggtggcttattattccgttggtcagcctatgcagatctcaaagccatcaaccggtatcaacattatttgaagcaacaatcgatagagcaacaacaagaattgcgccatgaaacttggttgaaagcggctgaacaaggtaaaacagaattagatcaaaaacttaatcacaaggagtgaacgaacatgaccactgttatcttagctgaaaaacctagtcaagcccgttcatacgttcaagcctttcaaaagagcacaaaaaaacagggttactatacggttagcgaccctgttttgcccgaaaatacgcttgtcacgtatggtctcggacatttagttgaactagccacaccggataaatatgatcagaaatatcagcaatgggccttatctaatttaccgatttttcccgataaatacaagtttgtggtgtcagctagtaaaaaagatcaattcaaggtcgtcaaagacctgttaacgaaggccgataccattattgttgccactgatagtggtcgggaaggctctaatattgcgtggtcaatcatgatccaagcccagattgacgttaaaaagaagaccattaagcggctatggttgaatagtttggaaaaagacgccattattaccggctttaaaaatcttggtgactggcacaaagactatttggcttataaagaagcccaaacccgtcaaattagtgattggttgatcggtatgaatggtagtcccttatatactttgttattaagacaaaacggggtacgcggggtatactcaattggtcgcgtgcagacgccaaccttgtatatggtctatcaaagggaccaggcaatcaaaaactttaagccggaaccttattttgagctaaatgcggaaattttagctaatcagcaaaaatttgtcgcaaaattagacccttatcagcgatttaaagacgaagcagggctaatgacattcatgcaagctaaacacgttcagaaaggctcacagggtggtttaatcaaggacgtgcaaaagcaggctaaaaagagtgccagtccccaactattctcgctatccagtctgcaaagtgccatgaataaacgttatcacgccagcgccagccaaaccttagcagccattcaaagtttatatgaagccaagttgttgagttatccccgcaccgattgtgcttatatcactgatgaagaatttgagtacttagtggctaatctgacgaagtatctggggttagtctctaagcaagtcgctttaaccaataccaccccaaataaacgttacgtcaatgggaaaaaggttgaagaacattacgccattatcatgactaaagttgtgccgacgaaagagaaactagccagcttacctaaattacagcaacaggtctatgatttggttttaagaacgacgttagcgatgtttgctgatccttacgaatatgaagaaaccaccattgttacccaagtcggcgatgctaattttaaagcaacgggtaaggtcccaactaagcaaggttggcaagcattatttgatgaaaacaaagccgaccagcaagaagcagccaccctaccgctcgttcaccaaggcgatcaagtccaagcaaatctgcaaacaccgcaaaaagaaacgacaccaccggtaccctttaccgaaggtaccctgattacggccatgaagaccgccggcaaaacgcttgatgatgaagcagcccaagcgattcttaaagatgtgcaaggcattgggacaagtgcaacccgggccaatgtgctggaagtgttaaagaaacgcggctatctcgtcactgaaaagaacaagctacacgtcagtgaagccggaattactttatgtaaagcggttgaacttgagcccttgctaactagtccagaaatgacagctaaatgggagcaagcgttacagcaaatcagtaccgaagaacgcaccccggataactttttgagccaaattaagaagtttgtggctaaattgatcgctgatgttcccacgcaattgactggcagtgcagccattaagcaacaaatcaatcaccaacagcaagcacaaaagtccgccgaggtcttcttagaaacaccgcaagcgaccgttttaaataaacagaagttttatattgtaaagcctaagcaaggcgaagactttaccctgcccaagaaatggagcagtaagaccctcggtaagaccgcaattaaagcgttggtcaccaagggggaaaccagcaaactaaagggtttcaagagcaaaaagggaaagtcgtttgacgccaagttaaagcttgacggccataaattaagttttgattttgattagaacctgcctaccgccctatactacgttccggttggttaacccgtcatttaggttcacttttacaatcccaaaagtaaacctgaacaacgggtgagattaacaaagcaaaggagatcataaaatgaacaacgaattagcagttttagccagtgaattacccgttttgcaagctaaaggaacctacaagtatttaaaagaaatcactggtaacggcgcttattatcaagtagcctggcaaaaattgtctgacggttacgttgccctttatggcacgaccccgattcaaataagatcattgccaacattgaatgatatttttgaagatgaggaggggtaacttatgccaaataaagcagatgtgaaggcttggaaagcacaattagtcgcccaggctgaacagcaaatcctaaaattaactgatagtgaccaatttaaaaagtatctcaataccctggctaaatttcatcgttatagcgccagaaacattgatttaatttatgcgcaaaatcctcaagccactcaagtcgccggttttaagcaatggcagaaggattttaaccgcaccgtcaaccggggcgcaaaagcgattcggattgcggctccgatcattaagaagctaacaccagccgagcagaagcatcttgataccaccgatgagcgcgccattgtcggttatcgctatctacccgtctttgatgtggcacaaactagcggtgaaccagtgttaagtgctaaagactttgtcaaagaaaatttggccgatcatcagaatgtgacaagcttatataacgcgttcaaggattatttaaaccagcaaaccgaccttaaagtcagtgaagtgcctttagcgacgctaaatggggctaagggatattttcaacccagcactaatgaaatcgtcattggtggcgatgagcccgacaatgctttgaaactaaagacgttataccacgaatatgcgcatagccagctacacggcttaaaatcagcctttaaagatcggccacgagcctatcaggaaacccaagccgaagcggttgcgtatgttgccatgcaaaatattggcgttgataccagcaactactccctcggttacgtggccacctgggctaaagataaagccgtgatccatagtgctttaagtgagatccagcaagttagcaacaaagtgattgagcttagtgacgggttaaccaaacaattaggcttacaagaagcccaaaaagaacctgagcatgatctaaaaaagctatcagcccatgatcttaataagtcctaccaaggcttgcaacaacaagttcagcaagcaactaatccacaacaaaaatcagaactacaaaataaattaaatgatgtacaccaggaaatcagtaatcgaactcaaaaacaactgaaagtatttgctgaacagcatccagaaatcaaacaaccagattctgaacctgatcaaagtctaaaacgttagccagtttttaaaggtcatgctataatgtaatagaaaagggaagccttgcgctaacaagacttcccatgcaagccgcttcaaaggcggtggcagaaatttaataaacgattttagctcgtcctgtgacctctaccaaagttacacagggcggctttttttatttgtgatgcttgtcgatatagctgaggagcgcgattaaaaacgtgccaaacagcaacatcaactggaatgtttataattgattcaagaaaatctaaaaacgatttttttcagtgatcgaatattaacagactaagcttagaactgtgtctttagtgctcacttttgtatgctaacctaaagtttaacaagtgttgccacttccgacccagatgttttgaacagaacattaggttgtaaacgtggtgttggtgaaatgtagtcgtatggctcccctgcaaaagttttaagcactgccattaggatatggcgcataccagcaggtggaatcgccataccaatttgtttccgcacagattctttaccaccaatgaagtgataattatcaggaaaggtttgcagtcgtgcacgttcacggttggttaatgctcggttttccttccagtgatacatatgggtaccaccgcctccagatccggtaacagtatatgacggcttattacggtctaggcgcttatagatatttgaaagccgagctcccttgacgtttagacgcagactttcaggaatttggtgcgaccaagcattaccaccttctgggatataggacaacatctcaatagtcgaagccttgtgacgtgttaattcgttattaaacgcgtctgctggaatcggtggattagttagagcctcgccagcggtaacatagtcatctggattgggtgtggtcggggcaggtacgtgaaatttaatgccttgaatagccagatcattgcgaataccaacaattaatatacgatgccgggcctgtggaacaccgtattcctcaaacttatagaagtttggcgttagtgtgtaaccaacatcggctaatgatttgagaatttgaatgaaagcatcaccgtcgttggcagaggttaggccaccgacgttttcggcgataaaaacctttggttgaaactcctttaatgttttaactccgtaagtatatagtggaccatatgttccatctaaccccttttgcttgccgacaacggaaaaatcattgcaagggaatccgaaaatcaacgcatccatatcagtcagtaattggtgattagtgagatctaatttccttacatcttcgcagtaaacggtagtcgccttagggttattaaggatgttcagtttataggtatcaacagtatctttatcaaattcatttgcccaggcatgttgatacccccattttctgcccttagtatcgataaagtgtgaagttttagcagcatatgcgccaccaccaggtccagcgaataattcagcagttctaaatatcatagtgaacacctccatgagttcagcatatcgaacaagtgttttagcatatgcctatgctaaaaatcatacgactttttattacatattgcaagctctaatagtcgtgattaatctgctttagtgtgggaaaatggagaataataggaggactaaaaatgacaattttatactctaaagtaccaccgatgccatttggggagagcttaccacttatttctaatcagttggtaaaagaggcgagttcagcttcgagaattgacattgcagtaggctatgtttctgtagatggattggataaactggactcattagtttcaaaggggaacattaagcagatctgtctggttgttggtatgtatctggaaagtggtattccagaaagtatctataatcgggtacgtttgttacataataaatggcaagctacaggtaaaggcgaaatccgctttgtgaacaatatgagctatcatggcaaggtttatctcttttggcaaccgaaccaacaaggaaatgatgatttgaagtcagcggtattaggatcagctaatttaagcgtgctggccccgttgggatctgttgctcgtcaatatgaactagcaaccacaattaccaattctaaccaactgcatgaattgtctactcatattgagaaattgaaaaccagctgcaccgtttctgccaccaatttaaacgatttcaaggtaatccacgagcggatcgaagtgcttggcgggatcgaagaagttttggaaacgaccgaaagtgaacaagatatgtatcgttcactgcagactgatattgagattaggattccaattaaagcaccattagctactaatcgtttttctaccgcccggcatgattacgcgcgatcaaatatcaatgtggcctatggcggcggtcggtataacaaattgagtggtggtgttgatcccagaaattggtatgaggttcaaattaccgtaaataagacgatctctactcagccaaactaccctaaaaataagcctttttggattgtaacggacgatggttataaatttgaagcgcataccactgctgataacaataaacaactgacggcttatggtaagactggtaacgatcgcgtttttgggcgctggatcaagggacgattggctacagctggatacgtcaaaccagtcgataatacagccgccgatacggaacgtctcggcgttgtaacgcaagaaatgttaaacgctgcccaaatgcgcgtgatggttcttactaagacatctacacaggaatatggggtggtattcaatcgattagctccaacaccacgaaataagaaaggtgctttagacaagaaacattggacacgggaattgctagacgtctggacagttcactttgaaggtgagaaaagctaatgggatatcttaataattacctacaacaatttcgtgatgcaggtaaagatgagcttgcaaacagcatagaaaaaacgtctcgacgtataggcaaaaaatacatcagccatttcacctatataacacatgaaatgggattgctttttggcaatattcaaagtgggaagacgggacaaacatttggcattatctgtgaagctgctgatttggaatttcgctacttcctactgatgacaacggacagcaaactcctacaaaaacaaacacttgaacgcgcacaacatgatttgcctgaatttgcaatctgtagcgagaatgatgaagaaaagttcagaagcgcaaaaaatcagccggtactaattattgtaaaaaagaatacacgtgttttacaggcatgggttgatcgattccgtaattctcaaaaactgaagggaaatgcattattcatcgttgatgatgaagctgatgctgcttcagaaaatacaaaggttaatcaaaaaaaggtttccgcgatcaatgatcgactacgaaaaatacgtgatacagcacaagcatcaatttatcttcaagtgactggtactccccaagccctgctacttcaaagtcttaactccaattggcggccaatgtttactgaatactttgaacctggtaatggctatctcggtggtgactttttctttccgggaacagagactaacgatatacctaacttcattcattttgttgatgatgaaacaccgcaagaaagcgcaaagcatgttgtgctccgccacttggtcgtatcagcacaaatattgctaactggtggtaaagtctcaaactgtttagttcaccctggcattcgacgagcagctcacgagaagtcaaaaaaagaaattgaagatgcaattgcctggtggacttaccatcatgctgacgaaaaattcactgatgcatttgatcgggagtatgccgctattacaccacaaaatactgagaaacaaccacacgatcaagtattgacacgtgttaaacagattcttgaaaaacgtgagtttacgattgtcctattaaacggaacatcaattgacgatgacaaagactatgagtctggatgtaactttgttattgggggaactaacctgggccggggtgtaacctttggccaattgaatacgttctactacaccaggaccagcaaaaatccaaatgcggatacgatgtggcaacataatcgcatgtttggctatgatcgtgaccctggcttgataacaatgtatagtagccgggcgttgtataaactttttgcagaaatcaatgagactaataactcgattatccgtcaagctcaagcaggaaagaagattacaattgcatatccagatggtttgaatccaacgcgatctaatgtgttagataaatctttgctgaatatcctggttggcggatcaaaccactttccaagcgtaccgaagaacgaaacgactacgcaaatatcagatttggttcaacaattttctaatgatgatccagctactgaagttagcctaaaatttatatcggatattttgaagcatttcaaagcagaaaaagagtttaatcttgatggttacatcaaaatgattgatagtgcccgtagtgagaatccgatggcaagcgcccatattcttgtcaggcgtaatcgtgccgtgacactgggaaaccgtgcattgctgtcaccaaacgactggaaagaaactaatcaattccaagacgagttcgtattaacactgtacaaagtctctggagagaagaacaatggtaagtcagtgtgggtaccgaatattaagttaccgatgaaaaagaacttttatattatttaaattgtaattttaatataacgaaagttctttattcggcatcgaaagaaagcccaatgtaaaataatcaatggcacttttgacttttaaaaaaaagaggttgggtatcatgaatgacagtcaaaaatttttagataaagtagaagggaaaaatatagattttttaattggttctggtgcaagttctgattatataagcactctttctgttggggaaaaagggaataaacacagtattgaagaccttttaactgcctataattctcaaaaaatggcacaagcttttttgaaattccttttttttgattcatcagtcaaaaatggattagttagcactactcacattccagaagaagcaatggatactctgaactcttataaagaattaattgagaatatgcttactctttcgcgccacaacggatttgaaagacctaaaagaactaatatttttactacaaactatgatacatttttcgaggccgcttttgatgatatttctcttgaacaccccttagccttttttaacgatggctctagaggtttctttacgcgtgaagttagttacgaaaactattattttaatgttacccacagtggatccattgacacatttcgtagagagataccgtctattaatctgtataaattacatggctctctttcatggtcaaaaaaagttttgaaagatgaccaaaccattattacatcaagcctagaaaatgaattactaacgaaaataaaagaagaatcagatactattttaaagatgttgaatcaaggaaatagaattgaagtaactgacgaaaacgttattgaccaatatcttagcaatatagaaagaaatgaagaactaaaagatgaactcggaatatttgaaaacgattattccaagctattaattgtgagtcctaccaaaagaaaatttcaagagacagtgtttcagaaacaatactatcaactactaagagaattcgaaaatgagttgcaaaaggataacactgttttaatttgttttggtttttccttcaaagatgaacatattttagatctgttaaaaagatctatttccaatccatctttacagattttcgttattccatatagtgaaaaagacgttgactatattaatcttgtgttaaaaggatatactgatgtgacatttttaaagtcccctgatactaacgagccaggtaacttcaatgtcctaaataaatttttagaaggagcctatggacaatgaaaacagctaagatggatccgttaccaagtgtcggaatcgtaactgaagtaaaggggacttacgttacagctagaatgtttgaaaatactaataatttaacatattacagaaacggggttacatataggggagtgggtactggagaatacattggaattcaaagaggcccctataaattagtaggcaaggtccttcacgaatatttagaagacacgcaaaaagacagtaatgatcaggaattttcaaaaaacagatttattagagaagtggatatttcaatcataggagcctttaggcaaagtaaattcacttttggaatttctatttttcctcaaatattttctgaaatcgtattactaagttcagaagaaacccttcagatactaacgggaaatattctcaatatagattatccattatatattggaaaaacagtccccgaaggacttaaatatgcaattgattggtcgcatatctttaacacgcattttgcaatttttggtaacactggcagtggaaaatctaacaccttggcaaaaatgtattcagaattatttaatactgctgataaaaataattggaatattaataattccaagtttatttttatagattttaatggtgaatacactggtgatgaatcgttaacatcaagcaaaaaaactattgaacttaatacttcatctacatctaaaggagacaaaataatccttcctagatcagaattctgggatatagaaatgttgtcagtgttgttttcagcaacgcaacaaacgcaagaaccctttcttagaacaactttaaagcattttaatcccgggaaaaataaagttacaaagaaagaaataataagttacgttgtaaccgccttttgtcaggtatttcaaaacaatgtgcaagacccaagaacgttaaatttacttaaagtaattttaaatgacttacaaattaaaataccagaaagttccgaacttagcatttggttaaaagcatcatggaacagcaatagtggcacatatttttctaatattgatactacttatacgggtctattttggagttttactagcaatggcaaaatctattttaataatatggtcaataaatcagaatttagatatttgatagaagaaactctaaattgggaggatgtcatgattgatactgattggcaacctctaactttgttatctgtgtttgtccatctacaaatgatttataaattaacctacggaggagctcaatttgatttcattgctcctttattaaacagaattgaagcaaaatcaaagatgtttaataagttaattaaagtaagcaatgacgactcggataatttttctgagaaatattgcacaataatttctttacgtaatgtcaataaagacgctaaagcaacaattccattattaattgcaaggtatctttataagcttcaaaaaaaagacttattaggagaagatgaaattactaagactactaaccttataatcgacgaagcccataacattctttctgtaaacagaaatcgagaaggtgataaatggcgagattatcgtttagatgtgtttgaagaaattattaaagaaggcaggaaatttggcttctttttaactattgctagtcagcgtcccgctgacatttcagcaactattgtttctcagatgcataattttattattcatcgtcttgtaaatgaagttgatttgaatatgttaggcaatacattgaattcattggatagtgtttcaaaatctgctatcccttctctagcccctggaagtgctatctttacaggaaccagctttccgctccctgtaatggttcatatagatcaattagataagggacatgctcccagtagtgataatgctaatttaaaaaaaatctggttaccacatgaccatcaaaaatgattttttgttttacgggtcataactttaaaaatccagcctctaaaaaatcatcaggatggtatttaaatggtcacggttccacttttcttgtaatcgctaaaataataactctttaaggttctggtgcaaattttcctcgctgacttgattttagtatactgggtgccaagaaacgagggattgcgcgcatgaatcactttaagggacgccactttcaaaaggacatcatcttagtagccgttggctactatttcagattcagtctcagctatcgtgacatcgttgaattgcttcgggatcggggtatcactgttcatcacaccacggtcatgcgttgggttcatcactatggccccatctttaaggctctatggcgtcggcatcaaacagctcacgctaaaagttggcgaatcgatgagacctatattcgagttaaaggccgttgggcctatttgtatcgcgctattgacagtaacggtttgaccatggattttgagctacgaaaacaccgcgattataccgcatcctatcactttttgaagcgtctcttgacgaccaatggtcggcctgatcgattagtcactgatcaatatcgggcaacactgaaagcagtgaagcacctgataaagcaagactatttgagcaaatcaacccaccaatgttccaaatatcgaaataatttgattgaacaggaccaccgattcattaaacgtcatcgtgtccgctcagcaagctttcaaagcattcgaaccgctagtgcaacgttgagcggtgtggaaattgttcacgcaatacgcaaaagaacccgacgagagttaagtctcatcgggttctcagtcgtggacgaattagaagcattgttagctgcataaccttcaacataggatcaatagctggttagatggtcatctctcacactgtttgcaccagatccgccgagatcacacttcccgactcaaaaatccgggcattcgtcattccgaccgatgaagaattgatgatcgctcgcgatgtagaacatttcaaaaaattaggtaaataagcgctaaaacagatgacacatgcgatcgacccgcttttgcgggtcggttttttttatgcaaaagagttattatttgcacaataagtccatccactttacgatgggttggtagataacttaaggaatttataaagaaaacgaggaggaagaagaaaatggacaagatcaacaagaatgatgaaaagcagctggaacatttaggtgcctttgaaatcagcaataaaatgctgtcattggcacaaaaaagcgaaaaaaataatatctttttgaatgctggccgcggaaacccgaactggatcaataaaaaagcccgtttggctttcactcgcatcgttgaatttggggtccttgaatcagaacgcacaatgaaagacggcgatttagccggatataccgaaaaagacgggatccgcgaacgttttgaaacattcctcgatccagataaaaacgaaaccgatcaatttttgatgaacgtcttgagttatatcaaagacgaactgcatttggaccgcgatgaagtcgtaaaagaatttgtggatggcgtcatcggcaataattatccggtcccaagccgcatcctgaaaaattccgaaacgatcatcaatcattatctgcaatctgtcttgtatcacggagaagatttggaaaatgaaacgcaattgttcccaacagaaggcgggactgcagcgatcgtttatattttcaattcgctgaaagaaaacaaattgatcaaaccgggcgacaagatcgcgctcaacacgccgatctttacgccgtacatccaaatcccagccttgaacgactatgaaatggtcgaaatcgacttgggctcgaaagaagaaaataattgggaagtttcgccgaaagagatcgacaaattacaggatcccgatatcaaagctttcttcattgtcaatccaagcaacccaggctccaaagcatttgaccaaaaagcactgaatgaaatcaaaaaagccgttgcgaagaatccgaacttgatgatcattactgatgatgtttacggaacgttcgttgacgatttccaaacagtttacagtgtcgcaccgaaaaatactttgcttgtttattcttactcgaaactctttggagcgaccggctggcgcttaggggtgatcggtgtcagcaaggacaatgtctttgataaattgatcgcggcacttccgcaagcagataaacaagcactcgaaaaacgttacagtcttgttgttttggaacccgaaaagatgaaattcatcgaccggatggtagcggattcccgttcgatcggcttgtatcatacttctggcttgtcaacaccgcagcagatcatggaagtcctcttcagcttgacgcatttggttgagaagacgaaaaacgatccgtatatcgcagcttcgaacaaattgatcgataaacgctacgacgacttgcataaagccttgacgtatccggaagacaacagcgaaacttctgcgaaatattattcgatcatcgatatttacgaattggctgaaaagcgtcacggcaaagcgttccgcgaatacttggcagacaacttcgaacaagtcgacttcttgctgaaattggctgagaagaacggcgttgtattgatggatggtgtcgggttcggtgcagcacctggcgatttgcgggtttctgaggcgaacctgccgacggaagattatcgcttgatcggccgtcaagtgctggaactgcttgatgaatattataaaacgtttgaagcacaaaaataggggtggatagtgatgaaagcaattgtggattatttgcttgccaatccgatcattccggtatttcttagtctgagcctaggctatctgctggggcgtttcaagatcaaaagcttctccgtcggttcgacggtcggggtcttgatcattgcgcttattatcggtcaaatcggagcttttaagatcgatccgcttgtcaaaagcattttcttcgatctctttatctttacgatcggctatgaagtcggaccttcatttattcgcagtttgaagagtaccggacttaagatcgttggccaaagtgtcttcttcgcggtagttgcgtttgcgatcgcgatggtcttgtttaaactattcaaagtcgaccttggcgaagcggctgggatcatcgccggcgctttaacgcagtcggcggtcatcgggactgccaactcgtcgatcaatggtcttgatatttcttcagctgctaaggcagcctacaactcggaagtcgcgatcgcatatgctttgacctatgttttcgggaccgtcggggtgctggtcttcttgaagaatatcgcgccagcgatcctgcacgtcgatttgaaagaagaaacgaaaaaattggcagaaaaactcaacttcacttccggaagtttttcgccattgactagttctgtgcgggtcagaggatttttgctgggagacgattctccgattgtcggcaaaaagatcttgcaaatcgaaaaacaatatcactatgaatttgttgttgaggatgtgctgcgcaaggaagaaagcatcccggcaaccagcgacttggtcctttcgccaggcgacgagatcgtggtcgtgggcaatatggaagaatttttacagttggaacaaagtcatggaacgaccgaagtttcaaacaaacagtatcgtaatatccaattgaaaacgatcaatgtgatgttgacgaatgcttttaatttccatgctttgcaagatatggtcaagagcggcttgatgatcacctccgtcgaacgcgacggcaaaaaagtgaccgatctgacaacgatgcgcagcggtgaccgcttgacgattatcggaactccgcgggcactgcaaaagatcttgccagaaatcggctatgagatcgctgaaggacaaacgaccgatatcagcttcttgactatcgggatcgttctcggggttctcttgggatcgatcgtggtcaaagctttcaatatcccgatcacactcggtgaaggcggcggcgcacttttcttggggctcttcttcggatggtatcaagaaaaacacgccaacatcggcaatatccccggacccgtccgctgggtcttcaagagtctcggtttgaacttgttcatcgcggtagtcgggctgcaagccggctcagactttgtcagcgccctagtgaagatgggctggaaagtattgatcatcggggcgatcatctcgatccttccgcatttcatcacattgctgttcggtcgatatgtcttgaagctgaacgcgatcgataatatcggctccttgactggggcgggtacgatcaccgctgctttgaacgcgatcaatgaagaaaccggcagcagtttgttcgccctcagttatacaccagggtatgcagtcggcaatatcctcttgacgatcctcggaccgttgacagttgcgcttttgagttaggcaaggcgcaaaatcataaataaagaggttgagacaaaagtgtccagcttcaagaaataagaagaaaaatccgaaaatagtttctcatatttttgagatttttcggcttatttccgaagaagctgcttttgaaacaccgtttattcggaaaaagaggctgggacatgacttttgtcccagcctcttttttatggttctataatatttagtgttggtggaaaatccttcgggtttttcttccagcactcttttttattcttgaggatagaaatagagatatccaaactgataaaatgtagtcgacgaaaaccaacagtcatcaggaaaggatatctccatggatcatcatactagaaaacttttaggtttcacagataaaaatctctctttcagcgagaattggctgaccgaacgaactcacgctgatagaacttgttcaattgttcctcggcaatttgctggcttggtaacggatcagtggctaatttgacgcgaccattttcacttgtggctaagtagtattctttttcagactgaccaagttcttgcgtttccaaaacatgtagattatgttcataacgtcctaatgcgttatcaacttccaacccataaaaaccaagaaagctttttagaaggctttcttggtttttatgggaaggcggaaaatctgtcgatacttcgatgggtttcacgccgcttgccggcgtaacgatggggactcgttcaggcgacgtcgatgcttcccttttgccttatttgatggatcaccttgggatgacggatgttcataaaatgatcgtcatcctgaacacaaaatccgggatcctcggtttgtccggaatctccagcgatatgcgcgatatcgaagctgctgtcaaagaagataacaaggccgcggaactggcgcttgaaatctattgcgaccggatccgcaaatatatcgctcagtatatttctgttatgaatggggtcgacgcgatcgtattcacagccggtgtaggcgaaaatgatactgggatgcgcgaacgcgttttgaaaccgatgacttggttcgggatcgattttgatgttgaaaccaataacaagatccacgggaaagaagccgagatggttctggtgcaaattttcctcgctgacttgattttagtatactgggtgccaagaaacgagggattgcgcgcatgaatcactttaagggacgccactttcaaaaggacatcatcttagtagccgttggctactatttcagattcagtctcagctatcgtgacatcgttgaattgcttcgggatcggggtatcactgttcatcacaccacggtcatgcgttgggttcatcactatggccccatctttaaggctctatggcgtcggcatcaaacagctcacgctaaaagttggcgaatcgatgagacctatattcgagttaaaggccgttgggcctatttgtatcgcgctattgacagtaacggtttgaccatggattttgagctacgaaaacaccgcgattataccgcatcctatcactttttgaagcgtctcttgacgaccaatggtcggcctgatcgattagtcactgatcaatatcgggcaacactgaaagcagtgaagcacctgataaagcaagactatttgagcaaatcaacccaccaatgttccaaatatcgaaataatttgattgaacaggaccaccgattcattaaacgtcatcgtgtccgctcagcaagctttcaaagcattcgaaccgctagtgcaacgttgagcggtgtggaaattgttcacgcaatacgcaaaagaacccgacgagagttaagtctcatcgggttctcagtcgtggacgaattagaagcattgttagctgcataaccttcaacataggatcaatagctggttagatggtcatctctcacactgtttgcaccagatccctctttaatatttctgttttttgacaaatatctgattcaataaattcactgctggcctgtgcaaccatacaatacttaaagtaaaggaggcacctttattgagggggagcgacgtaatgaagcttcgtttggatgggggcaacaaataacagcgtaaaacggccattagggtatatcctagtggtcttacttgtctgcacgagctgcttcaatttgcaagagttcaatagcattgtccaaaattatcaatcaactagcaaacagaggaccttaagcaaaactactgaacattgcttaaggccctctgtttgctacgtattatctaagtttatgcattgtttctgccataatccaatgaatgaattttaaattactgatgaagaatataaacattatgactacaacgataatccattcccatagcggagcttttgttaatgtgactaagctgtataagtaaaaaattgttatgggtaattcaataattgcggttatagctccaggaacataagcacgtttattaaagacaaaaactaagtgcatgatcaaatgaaacagatacggtaaaattgcagtggcaactagtaatggtgatcccatgatataggcgactgctgcgagcagtaaataaatacaaaattcttcccagattccagccgctaaaatatctgaacgattcactccaccaaacagcacacgcccgttaattttgggattatgatctttcaaccaatatgggacaaatactaactcttcaaaatcatggaacataaataacaatggcaatatccaataagaactaaaattaatcattttatggccctcccgctagtattatattatgttgatgcgaatctttgaatataatggaaacatgtgccactgaaaggagtttttgtgccatgtctcggaaaatgattattgaagagtctaaaaatgcttttattgaggccttgtttcaactactgaaaagcgaatcctttgaacatattacagtcaaacagttgacattagaatcgggttattccaaaaggacttattatcgatacttcaaaactaaaacaaaaattttagatatagcattttgtaaatatctcactagctatcatgattacttactaaaatcttccattacaccggatactatccctaaacattttcttgaatttatttggccccaccatgacaaaattgaattgctagctaaaaatgatctcttagttcctttgctaacaagacatattcaaaccattgtagcgcttctcctgaatgtaaatgtcccttggcgaaaaggcagtttgaataaccagcattatgagtacatgctaacgtactcaattggtgggttcggtgttctactggatacgctttttaagaagagtgctcccttatctccagatcaaattagcaaagctttaagcatggcattgaaagagattgctatccaagttgatatgaaataatataaaaaataccatacgttcaggatttctaactgacatttagcctctataactatatggtagattgtaaaattaatccgaacagcgtcggattaattttacaatctaccaattgcatgagtacaaaaggttggtagcaattaaaaaatgttcgataaataaggcggagtagcccgttaaggactactttttttggctataataatcatatactgcaaacaggaggtggcttgtattgactaaaagggagttattagtcccagaaatcacgacagaactaggggctcactgacaacgtgtgtatcgctcgataaaaggttgaggaatgtcaattactacggcgagcctactatcaagctggatagagagcattttattgtggtaggcatgtcgcggagatacaggtgccaaaaacgcgagtgagatagaaaaaaggtgtaaatgcttgatataaagccaaagcaagtcgatacaaagaagcgcatgtcagtacaaatgatacaggagaaaactgacaaagcattacagataaagagtttaagcaaggtagtgttgcagtacaaaaagtactggcggccaagggtcaacaaataaactagcacaacggggacttgaattttaattttttagggatacaataaaattatattgataagaggtgaatttaaatgaacaaatatgtcgaacttgatttagaacaattgcaacaaatctcaggcggtatgagtaaaaagcaatggtatcgtttaggagaacgtgtcggtcgtgtagcagtttttatcggtggaggattactttttaaataaaaatttttgcgtttctatactggtatgtgttatcgagaggtcggattctttatgaaaaaattaaaatcatttgaggtgctttctgatgaggaggctaaattgataattggcggcggacattgctatacggcggggtgtattcggcgtagagataagcctcggaattcagatagcttttttccgggattagcacatggtatttgtcaaggagttggtatttgcggatgaaaccccttttttataaaaaaccatcgttttatgtgtttattttattttcactgttcttaggtatttcattggtatatcggagagattggtggattacaatccctcttgtactagtagttttaatacaaggatatagaacaattagataatcataaatataagttgctcttggtttcataggaatcccaaaagtatagtaaaaatggtacggtccgttactgaaattagtgattgtaatatttttaccatgctttttatatttatttaatgtatgtctgcaagttactttgatacggtgtagacgtgattctgtgaatggacgctaaaaatatgaccaattttttattgtaatctcttattgataatgaaagtgtcgatgtccagaaaactatagcagtacaagggaaggtttattatgaatcttagcaagaataataaggtgtggtatcttatttcgtgtttatttctgggacttctatttttagaaatccccacacagtcagtaaatgctagtacaagtaaaaaaccagaagaatccgatacagtaataacggtagttcagtataaaaaaaatatattaaaatcgaataaagtaggtgtttcgggtttatataaacttataacgaaaaagggtaatcatccattctacttattttttggctctgaggagtgtcaatattgtcgaaagttttcggtaacgttgaagaaatttatggcacaaaagagcactcaacctgtctattatgtagatgtaaataaatttggtgtgaacgctgattcgcatagtgttacttcgaaaaaagtcatttcatttattaatgatagagttaatctacattcaataccgacaattgttgccgttaataatacacacatcataaaaatatatcatgattcaaatactacacttaaacagttgacagaactaaacaagcgactaatttcaaaataggttgtaaaaatgaaaaagtgctctaagagtaaattaaagttgcttgtactgagttctaaaagatgaaaattagctttcgaaaatggagttacggtcagccccatttccaagaaagctttttttgaatcaattatcagcaaaatttaattccattatttgcacgttggcaggaggtggggacaatgtaaatacatacgaatttttgtgccaaatttaatgtataatcgcctcggaatattcatacggaaggtaacggtagaaactaaaacctgaacattaatcttcttcaactacttcagagagatacgttctgttaatctaacttatctatatgttgagattgtaaaaaagaaagttttttggtaacaatgttgaaggggtgatcaatggttattggctatacacaggtttctaagaatggtcaaaaattaaatcaccaaattgaccaactgttaacttatggcgacaacgacccgaattcgaccagttattaccactaattcgagcaaacgacgtcgtggttgtcgaaagtatttctcgtctcggacgcaacacgctcgatattttaaatcttatccaactgctccatcaaagacaggtcaagtttgtctccttaaaagaaaatatgggcacggcaaccgttacccgccgggcaatactacaaatgatgagtgtaaatgcggaattggaatgtaatttactggctatcgctttaaggaagggattgccgtagttggccacgggtgccacaagagaaaatgaagatcgctattcgaatgtaccggagtaatgagtattcggtgaaaaagattctggcagccaatcagatctcgactgggactttttattgtgaagtgaatcgcttgaagctcaaaaattttaagtaaaaagatgaacagtaagcgtaagtgatcttatgattattcgtcttcctaccgcgaccttttcgtatagatgttccattgacctcattaagggaaagcttatgataaaagttaacatcctatcacggactagttgcaactggtctttattgctgatatttatttttttatttacccggcgaatagatagattttaaaatacatcatcgttgaaattacaacggttatttataattggtagggggagtacaagtatgcattggagaaactatgttgcgcaagttgacgagatggactgtggggtcgcagctttagcaatgattttgaaaaattatggttcgacaacatcattggcctatctaagaaatattgctaaaacgagtttagaagggactacggcattaggattagtaaaaacggccgaaaagttaggttttgaaaccaaagcaattcaagcagatatgagtcttttcgatgtccaagatttaccattgccattcattgtgcatgttaccaaaaatggggatctacagcatttttatgttgttgtaaaaacctcgaaaacgcatgtcgtgattgctgatccggacccaacagttgcggttatcagtatgtcaaaggaacggtttgaaagcgaatggtccggagttgcccttttctttgcaccgaag

SEQ ID NO: 18 - DNA, 36461 bp, synthetic construct
  source 1..36461: mol_type = other DNA; note = Lactobacillus plantarum PDA6 -Contig 18
atactagacaaaagatcagctcctaaaagatgggtttgtggtaaacaccattttaaaggaagctgatcttttttgtccgaacagcgttcggattaattttacaatctaccacacaaccaaaaagccactcatctcatcacgaggtgggtggcttttttgagtaagttaagtgacagcattgattgttatatgattgtgtatgtcctaaatggacacaagcaacgctcctaagcaaagcctgtatgtaatgatttcagaaaagccctctattccgcataatagaggacttttttgtgtgcattctgcttaatttaaacggacaagtatacatctaaaaggtgaacgtgtcgtctgagagcacgtgattatttactttttactttgttagcatcgccggtttccaaagtctgtatttgagtcgtaagcgtattttgttcagactcagttaacgattcaaaaaaagttttttgtaattgggctaatccgttttgttgagttgagctataccctaaaattaccatagctttcataaagttttttagatgattgtcaattctgagcgtagtatcaaaagtaacaccatctatttgtttagacttcgttttgtttgattcgtttagagaagatatggaaatttctttttggggctggggcgccgattttctaggaattattttgcttttatttgagttaggattgtgtaaaagttccaccatgctagtccgccctttcaataatttcttgtgccacagaatcgtataatctaattatttttttatcgaactgatcttttagaaatacacctctgattgaatatcttttgattctttccatattacgaattagggtttttaacatgttttctttcccaaattcttcttctgctacttctaatgtgctgtgatcaacaggcgccccattctttaatagcacaggaagtataccgagtaaattcaaactaggtgcttcgtattcatcgattacctgttcctgtatatattttagaaacgattcggcaccctgaagactgtgctcttgagtttgaaggataatcagaacccaatctgaagcgtataaggcgctatcagaaattaaggaaatagtcggtggcaaatcaaataccacaaaatcatatttttcttttagtgaagcaagtagcttgctaaaatatgtaactctatctttataattatttttaaactttttttccataatccgtgggtacaatgaaaaatctgcgcttgatggaataaagtcaatgtttttatccaaagtaaccaacgatcttgataagtcctcttcttggattgatgcaagcaaggtttgattaaatttaatatcatcgtggcctaaattagccgcggttttaaagtaaatatctgtagcgtttgcttgaggatcgaaatcaattaatagcgtttttttaccagcacgagctagtgccaggcatgcaagcgtggcatttgttgttttaccggtgccacctttaaaatttccaaaagtaattacttcacccattatactgacctccaattaagtatcctaatatacaaggatacttggatacaaggatgataacatacaaagatacttggatacaaggatacaaggatacatttcttctcaaaagccgttaaattaagattgactgcaagtatcctaatatacttagatacaaggatacaaggatacttagatacaaggatatgaatatacaaggatacaaggatacaaggatacataaaaagaaatgttgatttatcaccaaacaacgagtaatattggttacataaaatagaacataaaaaaacacccaccgacgggaatcggtgagcgccacacaaaagtcaactcatttactgactattatatcatggccggtgcgatttttaaagccctaggggacaagctggggtctaaatccaaggggacacgtttgccagggcgacttcaataagtctggctataccacaacaaggtcatctgtacggctgggtggtgaatggtgagcgcgaccattaacggcgcgggtggtaaaacgaagcttcggcttggtgccactgattagttggtgatcgaacaaacataaatacgtattgccaacgcctactagggcgttttttagtaggttaaaccgaaaacgtaggtttataatgagtggtggtagcaataccgcaattgtacagacaagcgacgggcgttaacgaccgacgaactaaggggaaacttttagtagtagaattgtactctggttcagttattccaaatagctgattccagggaacaattctgcgctcaaaacgtcactccctctaaactgaatggaaaaccgtagaccgtcaagtcaaattccaaagaaaaaaagaaagttggtggaattgttggaatgtaaggattacattgttccattgaatccagatgtgatcgttaagaagacaatctatcggagttctgcaagaattactgagcgacaaaggaaccaagtgaagagagttttgcgtagtcaagggtatcagggaagaattagtagtattcgatacactcgagtaaattacaagtattcctttaaagtatccgtgaagtatcggggaagtgttggcaaatttttggttaatacaaagaatgagacagttgaatttaagggaatggtctaggagtaatcccagtgaatttcacaaactcattttccccaattaaggccaatctgcaacctataccacttcttttttgggcaagttcacaaagataaaataacggaatgtggaagtgccagggcgtgatgaggttacttgggataagccgccttatgtgaagtagaaattggtatactaaaaaaggctcccggtttaacactggaggccttttttctaggttacatattttgaggatgaatgtttttatcttcgtagcttttacttgggtgctgtaacatgatgaatactgcttagtttttggtgccgtaccccgcaacagatgcgtcgcttcgttggtattatcttaaatgctaagtaccgagttgagaaggatcataaagatattggcgtcataatcccactggacgacgaagaacttaaatttttaatgactaaagccttgagacgttactttaacgccctaagaagcaatgagaagcacatcaagaacgtggaaaactacctgtacggcaccatgcaaaatctatttggtgtttggtggaataaacaagcggctagagaatacgcggccaaacaccccgaagaagaaaagctggccgacaacgacaacagtgggttgtactactagtcctaaaaggctgcaaaatcctttctaagcggttttaatacttactaacctttatacttaaattagatttaaatggcttaaacagaagaacaggggcttttaaataagtggcagagctaactagctcaaaagttcagcctttagatcaatgccaacctcaagtggtctgaggccagggttttatccattgatcagatactcaaaaggtagtataatggtagtagcaaaagaaaggggatgagacaatcatggcagttaaggaaaagaaacgggtccaagtcaagattgataaagatttggccgatgataccgaagcagttttaagcgaattgggcttaaatccaaccacggccattaacatgttttacaagcggattgttgctaatggtgctttaccttttaatgtgtctttaagcgaagaagaaagagctaatttacgctttttaaaggcgaccgaagggacaccagtcaccgagttcaaagacgctaaagaggtcgctgattggttcaacgatccagatgaggactaatgacttagtcagcctatacgttagttttgtagaaactaacggtggcaagtctcgaccagttttaattcgtcgggtatcagaacagacggtcgaggcttttaaaattaccagtcagtatgaaaagaagtcggcttatatcaagcaacaatattatccgattcaagattggcaatccgctgggttgaagaaaccttcctgggtcgatcttagtaatatttatcgctttcccaaagccggtttaaactttaaagaaatcggtcatttaagtaagctagatcaaaataaaatttcagattttacgcttgacctaaaatcaaaaagaagaggtaagggtcaaaagataattcaacagcgatcaagtaaaaggaagcacaaagaattcaaaaacagttaaaagactttgctaagaagctgtctaaaatctcttaagaagctgtttagtatctttgattttgacccaataatttgataaactactgtcaaaaaagttggtgatcatatgcaacattttagtcatcattaccaaagcgatatttctcggcaacaattcgatttgatccgtcaggatctgaaagcttcaagaaaacgaactcacccaaaacacattgatccttatgatatcttctgtgccatgctctatgtccttaaaaatggctgtacttggcgtgatttgccggctgattatccaaagtggtccaccgtttactactattggatgagttggtcaaaagcccccacccctgataaaccagttttattaactcaggttttaaaaaaattgtcgctgatcgacgattaaggcaagggcggtcagcccgaacttcgttcgtcattttagatgcccaaagcattaagaacaccgctaccgctgaaaataagggttacgatggtggcaagaaaatttccggcattaagcgccatttagccgttgacatcaatggattcccgcaagctatccatattacccgggctaacatcactgatcgtgacggggcgattgcactcgtcacccttaatttagagcagtttaaattggttcgaaccatgatggttgatagtggttataccggccaaaattttgccaatgagattagcagtttaacctcagccaaggtaatcgtcgttaaagaaatgagttacaccaattttcggttatcccccaacggtggctcattgaacgttcatttagttggttgggaaattatcatcgtttatggcgtaactgtgagcgtaagctcaacactagtcccatgatggtttcgttagcttttatcaggttacttctcaaaagatactaaacagtttctcacaccagttttgatcattgccatttactatcatggcaatgaggctaagattgaaggattactgacggcatcacaagtgttcctgagtattgctttaccgtttgccatcatcccactggtcatgttcaccagtaacaagaagttgatgggtgagttcgccaatcatacttgggtcaagtacgctgcttggtttgccaccattgtgctggtaaccttgaacatctacttgattctccagacggttggcttgctgaaataaccgtttaaagacctttataaaaaataagtaggtttccgttatattctttataaaagtgtttagcagttgggagtcgttgacaatttaaaaatttgtctgcggcttcttttcttttagtctaaaatagaggttaataactaacagggggattactaaatgatcaaacccgaaaagacaatcaatggaaccaaatggattgaaacgattcaaatcaatgccgaagaacgggcaaccctcgaagatcagtatggcatcgatgaagatattattgagtacgtcactgataatgatgaaagtactaattatgtttatgatatcaatgaggacgaccaattattcatctttctggcgccgtatgccctcgacaaagatgcgctgagatacattacccagccatttggcatgttgctccataaggacgttttattcacgtttaatcaaagccacatacctgaagtcaacacggcactttactcggcattggataatcccgaggttaagagcgtcgatgcatttattctggaaacactgtttacagttgttgacagctttatcccaatttctcgcggcattaccaagaaacgcaactatttggataaaatgttgaaccggaagacgaagaacagtgacttggtttcactttcatatcttcaacagacgttgacctttttgtccagcgcggtccaaaccaatctcagtgaactcgatcgtttgccaaagacccattttggtgtcggtgctgaccaagataaaattgatttattcgaagacgtgcaaattgaaggagaacaggtccaacggatgtttgagattgaaacccaagtcgttgaccgaatcgatcataccttcaacagcattgctaataacaacctgaacgatacaatgaaatttttgacaatttggtcactgaccatggctgtgccaacgatcattaccggattctatgggatgaacgtgaaactcccgttagccgggatgcaatatgcttggatgctgactttggggatttctgtcgccttgattgtggcgatgctgattatgctgaaggtctggcggaagatgtgatgggtgagtgacttgctgctgggtgggggacttttttggaatgtgtatagttgagcagttatgctattttaagcacccttcggcttctgaaatacgctccgacgaccctgaccccggccacataagacaaaaaatccagtaacgaacaaaaaccgttcgctactggattttctgccttatgctctggggtcaacccgggtcttgtcgcgctcttattttttaccatttctttacccaatcaataccaagcaaaaacattacccttctatactaaaagtgttagaagctgtctaaaatctcttaagtaatagtgctaaaaacgctaaaacgaccatttgcagactggtggttaattgacgctcacaatttttccgaagtcgccgacaattctctagccaactaaaagatcgttcgactacccaatgttggggcatgacttcgaatcgatgcaactcattgcgcttcgcaacctgcacggttgcgtttaaattactggctacatcgagctgaaaattaacgcctgaataaccaccatcaactaagacattttgaacctggcgtaaatgcatggcattgtaaagcgatcattgcactggccccgtctcgatcagagacgttcgctcgcgtcatgtgaatggcctgcggaaagccattgatatcaactgccagatggcgcttaatccccgagattttcttaccagcgtcgtaacctttgttttcagcagtagcggtgtttttgacgctctgagcgtcaacgataataaaggaagttaaagcttaacgtccttggtaagttcgccgagcaatgacaatttttttaaaacttgttccaataaagaatcagccgtaggctcagctttagttgaccaaattttgtaatagttgtaaactgaccgccattctgggaaatcaccggggacttgacgccattggcaaccggctttcaagacatataggaccgcacagaaaacctcgtagaggtcatattttcgaggcttagttcgcttacgaaaattttctaaagctggtcgaattaattcaaattgttgccgagtaatattgctgggataatttttcatagcttaaactcgcttttcacatagaagtatatcaaaaatcatagatcttggacagcttctaaacacaatccagaaattaagccaaaaaacaatcctgaaaataaaaacgatcggcctagttattaggttgatcgtttttttatttatccggtttatgggcgttaacatagtcagcaaatatttttaaaagttcttcggtttgttcgaccgagaggttattagcttgaaagtacttttctaataaagcccctttttgaattaatcggcgagaacgggctttgcgggcttgccgattttcatagtatttagattgccgtaatttaaaatcttcccgctcaattttttgttttaaacgcgcttgctgctcgactagtttttcatattgattagacatggaatttccccatctcgtatggctaatgatctacggactttacctttaaaaattcagaaaattgcttggctaaaagcttaatctgatcgttagacaaattagcataatctaaattggcttgactgatgatttgtttacctagccgttgttcaatcttatttttttcgtccttaattttttgattaagggcttttaatttagcttcttgtttttctaagttactttgagacataacgatccctccaatcatattagaaataatcaccaaaactatatcatataagaaacgttaagtcaaagtataaaagttgaaatagcgaagcggaaggcatacactaagttaaagttaagagaatcagcagaccgagtaaaatgaggtcaatgcgcacttacaccccactaaattcttgtggggcaaatcgtgctaaaatcctgtattagaagtcgccgatggcgacaacaaagtcaaaacccatagaatcaaaggaagatggtgactgacatggcaatatttcacatgagttttagtaatattagtgctggtaaaggacgaagtgcgattgccagtgccgcttatcgaagtggtgaaaagctatttgatgataaggaaggtcgccactatttttatgcccgatcgatcatgccagaaagctttattttgacgccaaaaaattcacctgaatgggcgagtgatcgagagcagttgtggaatgaagttgaaaagaaagatcgtaaatcaaactcacggtatgcaaaagagtttaacgtggctttaccggtagaattaagtgaatctgaacagaaagaattattgacaaaatatgtgcaagaaaattttgttgatcaaggcatggtagctgatgtagcgattcatcgcgaccaccaagataatccgcacgcacatgtgatgttaactaaccgaccatttaacccagacggaacatggggaatcaagagtaaaaagcaatatattttagatgagaatggcaataaaatgtataccggaactagcaagtaccctaagagtagaaagatactgatggtcgattgggataagaaagaaaaaataattgaatggcgtcataattgggcagttagtgtcaatcaggttttagagcaaaaaaatattccggatcgaatcagtgaaaaatcatttgtggaacagggaatagctgacacaccaatgcaacacgagggaatcaatagcaaacggcatgaaagaaaggcatttaatcaacaagttaagaactatcgtaagtccaaagctggctataaaaatatgcaggagaaagtagttaatcgaggccacttggatagcctaagtaaacacttctcatttaacgagaaaaaagtggtcaaagagttaagccacgaactgaaaacttatattagtttggaaagtttagatgataagcggcgcatgctatttaattggaaaaacagtaccttaattaagcacgctgttggtgaagatgtcactaagcaattattgacaattaaccaacaagaaagttcactaaaaaaagcagatgagctcttaaataaagtagttgatcgcacgactaaaaaactttatccagagcttgattttgaacagacaaccgcggctgaacgacgggaattgattaaagaaactaatagtgaacaaacgattttcaaaggcagtgaattaaacgaacgtttaatgaatattcgtgatgatttattgacccgacaattattgacctttaccaaacggctatacgttggctggaagttattaatgcaacaagaaaaggaagtcaaaatcaagcttaaatatacgctgatgattcatgatgatagcttagaaagtctagaacacgttgatcaaggtctactagaaaagtattcaccaaccgagcagcaaaagattactcgcgcagtcaaagacctacggacaatcatggcagttaagcaagtcattcaaacgcaataccatgaagtattgaaaagagcctttcccaatggtgatttagatgaactaccaatgattaaactggaacaggcctatacagcagtgatgtactatgatccagctttaaaaccgtgcaaggttgaaacaatcgcacagtggcaggaaaaaccaccgagggttttcaatacccaggaacatcaacaaggactagcttatttatcgggacagcttagcttagatcagttagagaatcatcacttacaacgggttttaaagcatgacggcactaaacaactctttttgggtgaatgcaaagccgatccgatggttaaaaacagtcagattgagaaaatccaaaagcagttaaaagagcaacaagctaaggacgatcaatatcgaaaatcccagctggcacattatcaaccattgaactacaagccagttagtccagaatattacctaaagacggcctttagtgacgcaatcatggccgctctatatgcccgtgatgaagattaccaacggcaaagacaggcgcaaggtttaaaagaggccgagtgggaaatgacgaaaaagcaacggcaacaccaaactcgaaatcggcatgaagatgggggcatgcacttgtaatcggaataaaaaatgcaccgttaaacctggttaaaagcggctgaacaaggcaaaacagaattagaacaaaagctgaatcataaggagtgaacgaacatgaccactgttatcttagctgaaaaacccagtcaagcccgttcatacgtccaagcctttcaaaagagcacaaaaaaacagggttactatacggttagtgaccctgttttgcccgcaaatacgcttgtgacgtatggtctcggacatttagttgaactagccacaccggataaatatgatcagaaatatcagcaatgggccttatctaatttaccgatttttcccgataaatataagtttgtggtgtcagctagtaaaaaagatcaattcaaggtcgtcaaagacctgttaacgaaggccgataccattattgttgccaccgacagtggtcgggaaggctctaatattgcgtggtcaatcatgagccaagcccagattgacgttaaaaagaagaccattaagcggctatggttgaatagtttggaaaaagacgccattattaccggattcaaaaatcttggtgattggcaccaagactatttggcgtataaagaagcccaaacccgtcaaattagcgattggttaattggaatgaatggcagccctttatacaccttgctattaagacaaaacggggtgcgcggggtgtactcgattggtcgagtacagacgccaactttgtatatggtttatcaaagagaccaggcaatcaaaaactttaagccagaaccttattttgaactaaatgcggaaattttaactaatcagcaaaaattcgtcgcaaaattagacccctatcagcgatttaaagacgaaacagggctaatgacattcatgcaggctaaacacgttcagaaaggctcacaggacggttttatcaaggacgtccaaaaacaaggcaaaaagcgtgctagtccccaactattctcactatccagtctccagagtgccatgaataaacgttatcatgccagtgccagccagactttggcggccattcagagtttatacgaagacaaactgctcagttatccccgcaccgattgtgcttatatcactgatgaagaatttgattatttagtggctaatctgacgaagtatctggggttggtctctaagcaagtcgctttaaccaataccgccccgaataagcgctatgttaatggaaagaaggttgaagaacactacgccattatcatgactaaaatcgtcccgacgaaagatcaattagctgccttacctaaattacagcaacaagtctatgacttggttttaagaacgacgttagcgatgtttgctgatccgtacgagtacgaggaaaccaccattattacccaagttggtgacgccaattttaaagcaaccggtaaggtcccaactaagcaaggttggcaagctttatttgatgatcacaaagccgaacagcaagaagcagcaaccttaccgctcgttcaccaaggcgaccaagttcaagcgaatctgcaaacaccgcaaaaaaaaacgacaccaccggtaccctttaccgaaggtaccttaattacggcaatgaagacggccggtaaaacacttgatgatgaagaagcccaagcgattcttaaagatgtgcaaggcattgggacaagtgcgacccgggccaatgtgctggaagtgttaaagaaacgcggctacttagttactgaaaagaataagttgaacgtcagtgaagccggaatcactttatgtaaagcagtcgaactcgaacccttgctaactagtccagaaatgacagctaaatgggagcaagcgttacaacaaatcagtaccgaagaacgtaccccagataactttttgagccaaattaagaagtttgtggcgaaattgatcgctgatgttccgacacaattaaccggcagtgcagccattaagcaacaaatcgatcaccaacagcaagtccaaaagtccgacgaggtcttcttagaaaccccgcaagcgaccgttttaaataaacagaagttttacattgtaaagcctaagcaaggcgaaagctttaccctacccaagaaatggagcagtaagacccttggtaagaccgcaattaaagcgctggtcaccaaggggaaaaccagcaaactaaagggtttcaagagcaaaaaaggaaagtcgtttgacgccaagttaaagcttgacggccataaattaagttttgattttgattagaacctgcctaccgcccttcacgttgttccggttggtgaacccgtcatttaggttcactttgacaaccctaaaagtaaacctaaacaacgggtgagattagcaacgcaaagaagatcataaatatggataacgaattaacagtcattgggagtgaattaccggttttgcaggctaaaggaacctacaagtatttaaaagaaaccactggtaacggagcctattatcaagtggcctggcaaaaattagctgatggctacgttgccctttatggcacgaccccgattcaaatcaacgtagcccctctatattgaatgatatttttgaagatgaggaggggtaggcaatgccgagtaaagccgacgttaaagcctggaaagcacaattagtcgcccaagccgaacaacaaatcctaaaattaaccgatagtgaccgatttaaacagtatcttaataccctggctaaatttcatcattatagcgccagaaacattgatttgatttatgcgcaaaatccgcaagccactcaagtcgcgggctttaagcaatggcaaacagattttaaccgcaccgttaataagggcgctaagtccattagaattgcggcaccgattattaagaaattaacacccgctgagcaaaagcgacttgatactacgtgattgagcttagtgacgggttaaccaaacaattaggcctacaagaagcacaaaaagaacctgagcatgatttaaaaaagctatcagcccaggatcttaataagtcctatcaaagcttgcaacaacaagttcagcaagcaacgaatccacaacaaaaatcagaactaaaaaataaattaaatgatgtacaccagaaaatcagtcatcgaacgcaaaaacagctgcaagcatttgctaaaaagaatccagaaattaaacaaccagattctgaacccgatcaaagtctaaaacgttagccagtttttaaagggcatgctataatggagacagaaaaaggaagccctgcgctaacaagacttcccatgcaagccgcttcaaaggcggtggcattagttaactaaacgatactgtcgtcccgtaactcgccaaagttataatcggggcggcttttttatttgttccttttgtcgatgtatgttagcaacgctaaaataaacattgcaaacagcaacatcaacgagagtgtctggaagacgctcattgactgtgaaaccttcctgaagattattccatgttcccatgggcctcacctcgcaagggaaaagacagccaccgcccttaaaacttcctgcgtaatctattatacaggtgaattaagtattgaccaagaacaataaaaattaagtcatggagtttcataggatcctaaatttgatcaaattaagctcagcaaaacatcttttgtagatacccttttttaagttcttggagtttttcaagcttacgctgatgaagagtgatgagatggtcaagttgtttgaaataactgcctatttttgcttgttcatcattatttggaaagtataaaattaagttttttaactcacttgcttttacaaggggttgtcctgtcccgaaagataacttcttcagatcaaattgcgtaagcaagttgtaaataaacgctagatttttcccttgtatgaatacagtattatccgtgatttttacctttccagaatgatgatacaagttcccagcatttgcaccaactcgagctgtcaatataaaatcaccctcatggttgtaatcttcatcataaccaattaccgatgtagaccctaaaacctcatattttgctaaatctgatttttcttgaagcatatacttacttttcccagtaccaatattatctacagcatcacttaacttacgctgttcccaagcgtcagcaagcactgaaaatcttaattgcgggaacttgctaccattttgggggaacattttttgcaaatagccctgtttaagttccttaagcttagctaacttacgctgatgaagagcgatagtgtcatctatctttttgaagaatgcccctattttttgttgctcatcgaattcaggaactcttaacttcatatccctaattagaccaagtgctataaatttttgagtcccacctgcattttctttttgaataaaccgattaaaagatggcgacttaagatattgcagtaaccatttattcgttataggattagaagttttttctttaattagtgccacatttttaatagcaaagtcatctctatcaacaattactggattaccgatagttccgatcattccgaataaaatatctccaatactaacctttgatctcttattaatttcattaaaatctttatccgttaagaatgatacatctgtcatgtctaaaccagaatgagttaaatttttagaggttaccatagggtgtccttggctaacgtactttggagaagcatgtgttccatctcttacatcagaaaattcacccaacctacgcttttcccaagggttagtgaaacctttaaatcttaattgcggatatttagcttggttatctttcattgtgggcctccggctttgactggtcattaacctgggtggccactaactggctagctaattcattaaaggcttgttcattttgactgattttctcgtctagttgctttagatcagctttaacttggtccagatcgatctcgggttccggttcaaacgtatcaacgtagcgcggaatatttaagttgtagtcattctccttgatttccgccggtgaggccacatgggcatatttatcgacatcttgccggttttgataagtggtcacaattttttgaatattggctgccgttagcttattttgattcttgtccttttcaaattcccgggacgcatcaataaacaagacgtcatcagtagttttgtgtttctttaaaatcatgatcaacgttggaataccagtggaatgaaaaatattggcaggtagcccaataatggcatcaatccgattatccagcaggagtttttgacgaatcttaccttctttagccccccgaaatagcacgccatggggtaagacgatgcccatagttccgtattcctgcaaatgataaaagccgtgtagcagaaaggcaaagtcggctttagatttaggtggtaagacgccatagtcgcggaaacggggatcagacaagcgtttatcactgttatcccagtgtgccgagtagggtgggttcataacgaccgcatcaaataagtaaggttcgtcaaccggccaatctttacttaacgtgtcgccattgcgtaagtgcatatcgtcatacgagacgccgtgcaacatcaagttcattcgggctaggttataggttgtggtattcaattcttgaccgtggtaactcactaaacccggattttgcacgtgctgtccgacatttaacagcagtgaaccagaaccaactgctggatcatagatagtccgcacttggttgtcacctgcattgcgctgataggtcacaatctgggcaataatgtcggacacctgtcgcggggtataaaattcccctgccttcttaccagaatcactggcaaattgcgcgattaagtattcataggcgtcacctaggacgtcgccttgatgatggacgagatcaatcgcatttaaagccaacatagtatcactaatagtttggttccgttgttgtaaagaactacctaatttattactacttaaatccacatcggcaaacaagcccgaaaagtcttgcgctgaagatagattttgtgtcgactgttccagatcatgaagtgcctgtgataaatcgtctaacgcaaaattatgggcttgaatcttgccaattagggtggcgtacaacgcctggggttgaattaaatagccgagcgtgttttgcaaatactcaactaaactgggctgcactgagacgccttccaactcaaactgaggatccatatactgagcatatttctgagtgacattttcggtttcacctgcccattcactaaaggtcgtcaaggttttctcggataggaatcgataaaaaattaaccctaataaatagtttttatattcggaggcgtccattttcccgcgtaagacatcggccgcattccatagggcgctttcaagttgactagcttgcgttgttttttctgacattgtttaacctcacttatttttgtaaatagattgctaaatcgtgttcaataaactgccgccaagcgttttgggacttaattcgatatagcggcaaaatagctggaatcttcggcccagtggcagtttgagcttgtaaggccgctgttaaacttgctgactgcgttaattcttgttcatgatgccattcatcagtccccacgttgtgttcgcgcgccacccgcaagagggctgcttgatctaagccccacgtgtgggcaaaggccgtcgttttttggaccaattgtctctgggcgtaatcagtcaccaactcccgagcattcaacgctactggcgctttattttggtcactctgttgctgcgactgttgcatttgttgctcaatatagggcatggcttcgcgaattaactgggcctgttgcggttgcgtttccgccaatttattcaaactagcctgtactttggcactgttttgcaggtaatccgtcatatgcgcttgggcttgatcaggtgtcgagtactgttgctgttcatcaatccagtcttgaattaattgcgtcaaataatcatagtccaccaagacaactgaaccaacagctaaggaaaagtctaaagcagctaattcttcggggactttctcgggctcttggttagtgaccgccgctttaatccgcagatatttacccgtataggattctacttcgggctgagcgataccaaaggccttttcgctgttctcccaagtaaaatcgttgtacatcgatagtgagttcaattgttgattcacttgacgaaaggccttcacaaactgcaccttggcagtggttcctttcaggtcatcggccgccgtaggcgttggggcaatggcttttaaatccaccacagccttttgaaattttaagacggcctgctgataagtgggacgaatgatgacattaaacgagccttcgccactatataacttgtaagcttcacgttcattagcttccatgattgccggcacccgaaaggtcacaatttgaccctcttgttttaattcccggttttggagccggttggtgcgtgagtaggattgaatgagttcttgataagctaaggtgcggtcaacaaagagcgtgtttagccgaggagcatcaaaacccgttaataaccgccgcaccacaatcactaaattaatttcctgatccggtttcaaatgagcaaagaccgcctcacgccgggcagcccgttttgcgacatcttcgttatagagattcaaatcggctaaatcaaaattagtgtgatactgctgattataatcttttaaaatggtggccatttgatcatgtttgtgcgcactctgatcttcgttttcacttaatgaataagtaatcgcaattcggggccaattaggatccagctgattatgagtagtctttttcgcggctttaaaggcttgataatagcgttgcgccatttcaatggaactggtggtcaaaatcgcattatagttgccatgacccaaactcgttttacgtgggcctttttgtaaaatatattgaacaacttgttggatatgttcatcggtctcaaagtcagccggagttaaatacgtttcttccaagtcctttactgacatcgcttgaatcttggcttgaatttttgcttcatcagctgtactcagcaggcggccttgcttatcacgacgcgctttgacgcgctgggtttctttttcgagggcccgggttattaacgtgtctttgccaatcgttgttacatgttcgacgttaaacggtaacacggcttggtcctctaaggcgtctcgcaagttataaacatgacagactttaccaaatagctcctcagtcgtaactgctagatcccccttgagctgtttcttattttcattaaagataggggtgccggtgtaaccataccaattactgttgacaaacgctgcccgaatttccttttgcatcttaccaaactgcgaccggtgggcttcgtcaacaaagaagattacccgttgttttaaagtcttgctaaagcgggattgcttaccggttgccagctgggcttgcgtttttttgaccgcccgatggagtttttgaattgaggtgaccaagactttaccgtcattttgttgcaatttacgcattaaatcaccggtgttttgggcttcgttaatggcaatatcatcattggcagcataggcactaaagttactagttgtctgttcatctaaatcccgccggtcaactaaaaagatgaccttatcgacaccaggatcttgcgcagctaatttagcggttttatatgaggtgagtgttttaccagaacccgtggtatgccaaacaaagccatcttgatggtcatgaatccggtgcatcacggcttcaatcgcataaatctgataaggccgtaagagaattaagctctgacgttcttggtcgatgaccgtatattcactgaccattttgtgggccatgggaatattaaggacttggcgcgtgaacgctaagccgttttccacggggtgattatcccgtgtccgccaattaaacaaaaaggctttgttgaaacgatccggttcggcattcgcaaaatacgccgtactatctggcgtcataatcacaaacatttgcagcagcgagtaaatccccgtatatttaccttcttgcgcgtatttttcaacttgattaaaagcctggttaagttcgaccgtggctttttttagttccaattgaattaagggtaacccattaatcaatagggttacgtcaaaacggcgatcaggatcgacatcttgagtaccagctagccgtggtcgcactgcttgtcggaccacttcataactagatttaccgccagcaacgtccgctttccaaaacaactcgagcgtcaccgtgcccaacttagcatcatcacgttcaacttcaactttgccaatgccattctcggcggctagtaatttagccgcttcgtagggcgtccggacctcaatcgcccgtttaacttgattaaattcggtatcagttaaagggtgtccctgcaatttagcatagttattgttatttaatttatcgcgaaaattagcccataattgatccggcgtcgcaccatacaggtcttttcgttccacccattgattacttccggtcgttaaggttttaacaacttctttttcaaacgacagctccaacataaaaaagtcccttccccctgcttttaagttacttactagttagttatatgtgaaattgtttgaaactttttttgaaaacaaagtaatttgttatttctttctctcataagaagtttccccttaaaatgatttttcattttatatgcaaataaaatcccatccacaagccctcagtaaatgctcatctttgtcagagatctcagattcaggcaaagcaatacaaaccatacccttcgctcttgttaaggcaacgtaattaagcgacattctttcgtcattactattcttggactcttttccctctaaaaatggtaaaattttttgaacatcatgagttctaaggaaggtttctaacaacaaagttgctaaatgtgtttggcctttgacactatggatactgcctaatttaatttcaacctgtctatccttatgggaaaaaataaaactattatttcgtttcttgggggattcaatctgattatttaattcttttcccatattatcctgccattcaaagaaaggatttctggtctcaaagttttcaatagtttcaagtgttagttcgatattggaaactgcctctgtccatacttttttaggcaaatcttccttaaataataaaagcttaatattacgcctaagcaacatcaaatcttcgtctttaagagttttagagaacacactaaaaggattcttatacaacctgtacttcttttttcctgttagtaaatcattcaaaaaatcaactaggcccaagattatcattttaacagctgattcgctctcattactcttcttaactaacaaacgcgcacgtttaacatatttccaaaaatgatcatatttaactctcaacttatcaacattagcattagatggatcgtattgtggccaatatgcttcaatattagcaggaaaatgcttttgtacgtccgctggatccttaattttgtggacccggccgattgcaaaacattcatagccttcacagccattaatttcttcatcagaaaagttgtctagaaccaattgtccaaaggttggaagtacttttgcaatactattttcattaaacattattatagttgctgggatattcttaaaatctgtgttaacgcccttcatggattcaccagagatagctaagggattggcaatatttgcgattttatcagttaaacgttggctatccagaatactaaaatgcggagaacttggaataacggctttagaataacgaataccatcgtcataaatgctttggtttgaatcgccaaacgcttgaatatcagagttagagaatgaattccttactaaatcccaaagtatcaatgatgtatcttgggcttcgtcaataaataataacggaaaacgtttcgaaatattttttgatatttcagaatgcttttttatcgcaagattcgaaaaataaatgacttcatcataagtcagatttccctgtctaatcgaatattcaatgattttcttaattcttttttgagttgcactagattctgagaacgtaaatcccttttttaaggaatattccatgactacattacgatgagaatcaattgccttatttggcccaataatttttcttcgcattgccaaggtaatactagaatcgatagtttgaatgtgaatacccatggatctaaaccaaggtttaaccacaaagtcactaaaaaaagagtggaatgtcccaataaaattaggataactcaataatttttctccataagatgtaccgcccaatcttcgctgaacttcttcacgtgctgcatttgtaaaagaaagtacacaaattcccgaggacatattactcctcttttgagcaagaataccaagcttagtgattaacagagtcgttttcccagtgcctgggaaggcttgaatatcttgaaaatcatttggcggcatactcttaataatctctcgacgattaaaatcaaagtgtatttggttccccattgcaatttcaatttgatcaatatccgcatctgttattacaatttcactatttttcattatttccaccagttacgtatttaatggcatcaactaaataagatgggataatttccttatatgaaatctcagcacccaacatgtcttctaacttattagctaaataattagcaaattctgctttgtgatctttaacatgtttatagaataatacagaacgactttctgaatctttagcgtcatcgaaacccttgagccatttagtttgagtttcttgtttaattccagtagcttgaaataaagcatcaatcaatgtctttttaaatatgtcattcttccaccctgaccaaacaagatcatattcaagtgtccaatgattggaaataaacgcctttacatcaccgtcattaatatcctcttcccgttgctttaatttatcttgcagacttggatcttgtagaagatcactttctgtgtgccaatgacgctttgcattttggacatcctggtttagaatgtttggagctacgtctggttctatatctctatcagtaatgcaagccacaggaatccccatctttgtgtcatcagagcgtttaaaaatatttgcataatgtattaagcccttactcataacatttactatggaaacaccatagtcagaaagatttcgacctattaactttgctagtgttgggagaagtatttcttcaccacttccctcaacaatcagcacgccattcgcaaaaaacaggttagatttggttgcgtctaaaaatctttcgagaaacttataatcatttgcagcaagttttgtgctcttaacatccataggataaacttttccagattttacaataaccaaattttccaaatgtacaacggaggcaagcagtggtgaatgagacgttacaattatttgatgagaagaatcattagctgaagactccaaagaccgaatcaacttcatttgacgctgtgggtgaatatgtgcttctggctcttcaatgagagtgaactggcttgagttacttttttgcttctgcaataaaagttcacatgccatactcataatattactagttcccaatcccggaatcccgtagacatcctttttatcgtgatcaacgttcagcccaactttttctaggagggataaaactttctggctttcagaaacattggaattagctacctccaactttgttttaacttgatctccatttaagagcattgtctgagttaaaatactattcatttgttcgctggcttttaccaaaggcgcgaaattttccaaaaggtagttcgtcaaattaaaaattccagtgagagacagatctgtaacttgggtttctttagaatattctgagcttccgcaatctaagttgggtacttgtttaatgacttgtgatagtcttgagcccttcccagcctgcatatccatgtatgcgtccctcaaaggcttcaggtatgtagttctaaacatctcacgggcctccgcaacaaatgtagggccatctccattctttcctgaagttatctccacaataggtcgagctggaatgaattttagactaaagtggcaagtccaattcaagtagacaactggtccacttttggtataagtaagatattctaaaaataatgctttctcatcttcagttaaattattgaaacacacttgtatttgaatttcgttattaagatcgttattgaagacgtctgatggtagtatacgattccacctcatatcagtagttcccattgcataccgcaaggcatcgataatagcagattttccagcatcattttctcctaccaatactgttaatccatggtgaaactgaatagtacatacttctggaccaaattgtctaaaattcttaattttaagtgtttgtatttggaagcttttccctcctaaatttttcttaaggttaaagattttgttcattagccattgtttatattaaaacactcataataagtaaattatacccgggtttatattacttcccaattaatttggtcaatttattcatgatggaaaaagaatgtttaaagaatcacactaaatagcaacgttaatacagattactaaaaataatacatatgtatttactatgtgattgtagcatcctgaaaagcataccattcattttgactattagggtatgccttaatggctgtttttgatagcatactatacttggatttatagatgtttattaaaactgtctaaatgagaagaccagacattgttttattagtatgaaaagaggtgatgaacatagcggaacgtccaatttttgtagaaatatgagcagcaagacgttctctaatttttattggtatattttattggtatagtagattgtaaaattaatccgaacgctgttcggacaaaaaagatcagcttcctctaaaatggtgtttaccacaaacccatcttttaggagctgatcttttgtctagtataacctattttgaacgaattaaaatcgaaaccttttgtgaactagggctgtccaatatccaaatgggcgatcacgatgtggtcggaaaactaaactgagtgacgaattaaagcaaaccattctaaaccatttacgtctaagctggtcaccagaaatgattgctcacgaatttaaactagctactaaatctatttacaattggttaaatcaggggaaaattgatttccccttgaatgatctacctgaacatggcgtacgccaacggcgtaacgttgaccaacggtccaagtataaccaatcattaggtcagtcaattaaaaaacgaccaagcgtaattaatcaacgtaatcgcatcggtgattttgaaatggatacggttgttggccctcgaggacatagtaaggcagttttattaactttactcgatcgtaaatcacgttttctttgggcttaccagctaaaagatcggacagcagcaaccgtcaatgaagcgctgactgagtttttaacaacttttaagcggcctggtttcatttgaaccacggtaaggtatccagggtctattactgtcatgcttatgccaccggctgaacgcgctagtaatgaacgctttaatcggaacttacattatttttaccctaaagggacttgttttgagcacattagtgctcaagatttgacaactctgttactccaaattaaccaaagaccgcttaaagtactcaactggcaaacaccttgccaagtcatgctgactaatttgtcaaaaaatttggattaaagttgcaatctaccgaattaattatggctcgtcaattcgacagcaagaccagccgtcggattgccagtgaccttcatcgcaactctagtacgatcagtcatgagttgaaatgtggaacgggttgtcaaattggtgctaatcatcagccttttaagacctactttgcggataatgctcaattgatttatgacaaccatcggatggcctgtcgcgctgtaagttaggtgttaagggtacctgaattcttccgccaattagtgtttggattgcattgtaagccgcgtattcacagtgttgattcctttgtacactggttcaaaatgaaccaaccggaactaccatgtccgtcgacggccgcttagaactgactaacagtgaactgacaatgaagttgcgccgacgggtaaagtcatctcgcaagactcacagcagcatgaataatcgtcctttagtgaagctgaaaataccaatagtgggctcattttagccacctcgaatgaacttttcaacacaatttttagctcaatcagacctttaactaatttacctgattgttgcaattactatatgtagtgctataatgtcattctaaccaccatatatagaaaaaggacgatgattagttacggaaaccataaatatcctctacatcagcttgagtggcaacacaaaatattttattagcagactgacaacatactttgagaaagaacgtcatgttcgggttagttccattaatgttaaagaacaccctgaattcaccactcttgacaagccgtttgttaccttcctaccagcctttcttaaaggtggtaatggggttaataacggttatactgaaatattaactactattttgggagattacctcgcgtacgaaggcaattaccagcattgctacggtattatcggtagcggtaatcgtaattttaataagcagtttgcactcacggctaaacaatatgctaaacgcttcgattttccttacattaccgattttgagctacgtggcaccgcacacgacattcctcgcattgccgatgccatcttaacctatcgcaatcaattttgttttcaaacaacaaaggagtaatccctaatggtaactagcaccccagaaatggaaaatacctatttttacttaaataacctcgtaaacatccctgtcgacggagaaattccgctatattacgatcaagaagccctcaaggcctattttgaagagacggtcgaaccaaagactaaacaatttgattcattggatgccaaattaaactacttagtcgacgaagattacattgatccagatatcttgaatcagtattcccacgaatttgtgcggtccttgttcgaccgaatgaaagaccatcacttccatttccgcagctttctcggcgcgtacaagttttacacacagtacgccatgaaaaccaacgacggacaacaattcttggaaggctttatcgaccgtgttgtcttcaatgcactctaccttgcaaacggtgatgagcaacttgctaatgacgttgccgatgaattaatttcacagcgttaccagcccgccactcccactttcctcaacgcggggaaaaagcgccgcggagaaatggtgtcgtgtttcctaattgatatggccgattccatgctctcaattggacgtggcgttaattctgcccttcaactatctcgaatcggtgggggcgtcggcgttaacttgtcaaacttgcgcgcctcaggtgatcctattaagcagatttccaacgcctcgtctggcgttgtaccagtgatgaagttacttgaagactcatttagctacagtaaccaacttgggcaacggaacggcgccggagtggtttatctcaacgtcttccatcctgacatcttacattttctggataccaaaaaggaaaatgcggacgaaaaaattcgggtgaagaccttgtccctcggtttgattgttcctgataaatattatgaattactcaagactaacgaaccaatgtatctttttagcccctatgatgtcgaacgtgaatatcgtacgccatttgcttacatcgatatcaccaaagaatataacaacatggtcgctaaccccaatattaagaagtcagtctttaacgcacggaaactagaacaaaagatttctcaactccaacaagaatctggttatccttacatcttgaacattgatacggccaaccaaactaaccctgtcgatggcaaaattattatgagtaacctttgtagtgagatcttacagcctcaagaaccgtcaaaacttgacgatgacctatcgtacaagacaactggcaccgatatttcatgtaatctcggatcaaccaatatcatgaatatgattgactcgccggacttcggtcactcagttgaggttgctgttcgtgcgctcaccctcgtaactgacacaaccgacgttaaggaagtaccgactgttaaacatggtaacgaactttaccacacgattggattaggggctatgggtctgcatactgcccttgcacgccaccaaattgagtatggctcaccagaggcccttgaatttactgatgcctacttcctagccttaaactactattcactcgctacgagcaatcgaattgcccgtgaacgccacgaaaccttcgctaaatttgaccaatcaaagtacgctgatggtagttacttcgatcaatacttgaacgcagactttgaatttaagagcactaaagttgcagagattttcaaaaacattaaattaccatctgttgccgactgggaggccctcaaacaggccgtcatggcggatggtctttaccatcgtaaccgacttgccgtggcaccgaatggttccatttcgtacgtcaatgaaacgagtgcgtcacttcacccaatcacacaattagtagaacaacggcaggaaaataaagtgggatcaatcttctacccggcaccctacctgtctaacgaaactttgccctactacacgcccgcatatgatatcgaccaacgcaaaatcatcgatacctatgccgtagcgcaaaaacacattgatcaaggcatgagtctgacactgttcatgcgttcagttttgaaacccgacctttacgagtggaaggacaatgacaacttgaagatgacgacccgggaccttaaccggttacggaattacgcctggaccaagggcatcaagtcactttactacattcgaacattcacagaagacgatgaaattaaaacggcaaatgaatgtgaatcatgcatgatctaggaaattcacttggggtcttaccgtccgtttaacacaccggcatacgttattgggtcacaagacccatatacccatgaatcctaattaaggagacgaacaaataacgatggactatttatactacaaagcaattaactgggatgatattaaagataatttcgataaatacacgtgggaacaactcaccactaacttttggttggacattcggattcccgtcacgaatgatcaaccagcttggcaacagctagcagacactcaacaacaggccattactcgtatgttggcaggtacatcaatgttagccgtctaccaatcagaagttggcacccctgctattcgccacgatcggagaactcaacaagaagaatccgtattaaacaccattacctttatgaaatcagtccatgccaaaagctgtacgaccattttccgggctctgattccgggtaacggcggtgaaagttttacttgggcagatgataatgccaatttgcaagctgaaatcgaccaactcgctcaaacgagcaccaatggcacggctttacaaaaaaaagccctttttattttgaccgaaactggcctttcatttggtaaatattggccaacccttcaaacccattctctcgtcaatacctaccaaatgttggccaatattcttcgtggaagtgccatctttagtgcctatgtcggctacaaatttcaccttgggtttgaagacctcgcgtcaagtgaccaagccgaactgcagcattggattaacacccagtttgatcaactcatgcaaactgaaaaagatttcttagaagctaaccttgacgatgccaccgaagccatcaatctggcctcctatggtgccaatcatgcattaatgtcacttggctttaacgctgtctacgaagttcaaccgtcttcactagtggcgcaactcaaagaactgatgattgaccaaaatcaattcttgcaacaggtaacggctgcaaacaatgaatcggacactgaaaaaatgaccgatgacgactacgacttttaaggagtattcaactaatgagctataaaacaattaattgggacatcatcgaagacgaacttgacgaatatgtatgggataaagcaacggcacaatactggctggatacgcgagtacctgtttctaatgatttacgggactggcggacactctctggcaccgaaaaatcggttatcaatcgggttgtgggtggattagccttgctggacacactccaatccgaagaaggagtcgacgtgatgcggcccgacgttcggacacgaaaagaagcagcagtcctcaatgactttttgatgatggagtcaattcatgccaaaagttacggcactattttgacatctttgaacgatcaagccactgttgacgaagtgtttaagtggatgaacaataatccccgaatgcaatacaaagccaaacggatcaatgatatttatcaaacggggaacaaccttgaaaagaaagtcgcaagcgtctttcttgaaggaattttgtactacaccaacttttttaccccactttggtaccgtggtaacaataagctggcaaatctttctgaagtcatcaaactagtgatccgtgatgaatctgttcatggtacctacctcggctacaaattccaattgggatataacgagctatcagtgactgaacaaaaaccattcaaaaagtggatggatgagttgctcgatgatctccttgagaacgagtttgcgttcaccgaagaagtctacgcgccgattggtttagcggaagacgttaaacaattcgttcactacaacgccaacaaggcgctccaaaatatgggcttcgaatctcgcttccccaatgctgagattaaagatatcaacccaatcgtaatgaacggaatttcaaccgaaacggccaatcatgatttcttttcacaagttggtgctggctatctaatgggtaatgctgaagctatgagtagcggcgactatgacttctaacataggcttctaggcataattcaaatttaaaaaagccaatgtccacaggagatattaaaggtgcctctgtcaaccggtgttgacgaagttatatttagaaaccaatttatttacgaattggtttcttttttcgattttgattccaatcccgaattcgataaataaaggttttccagttcttgtaatcatacgcggttcttttgatttgcttgattttacggttcacaccttctgcgaaatcatttgatacccgtccgtagtcatattttttatgagttgtacccgagtttgattcaaagcttgtacggccatttgaacaagatgaaggttatccacgatcagtttggcgtgtggaaagagtgttcgaagagcaggttgatattgagaattaaagtccatgacaacccgagttacgcgctcacgatgacgtttagaataacaattgagaaagaaatttttaatatcaggtagattgtaacactcttggtgctgatcggtaccatccggattttaaagctgactattcgtcataatccattcggatgataaccggatccttagttagaaagtcacctattccagataagaacttttgaaagtggggagtgttgttgtggaattcaacagcgtcagcatctttccaatgttcaatgatctcatactcggtttttgaattgacatccttgtagtgatgataactaatgtttccggcttcgttacttgagccagcaactaaatcggcaataaaagcctcgtaagcagcctgtttacctggaattactgacagttcaacgttgatgactttcataattaaaactcctttaaaatatatttactgtaattataatatcgcaataaaggtctaaatatgtagaaagtgactttgtttttaaaaataaaatttgaaaagctttcattttcttatttacttttaatattaaccgtgatagtattctatacaattcatgaaaagaggaatgaaaatgaccaattcaacatttaaattgaacaccattattacccgcgtaattattattatttaatgtgcgggcgaattgatgtgcccgcaagcaagcgggcagaattggttatttaacaccaaggactgtcttaaggtccttggtgtttttttatttttaaggaggtgacaaacttcccttaattatgaatgagactgcaattattggtagaatttacttgttttgattgaataggagtggagcaaatggaagaaatatcaaatacatattctttaacagaagcaaaagttgccaaaatggaacgagatccagttaaaactgtcgttatggcatctatgattggaaccgcaattgaattttttgacttttatgcatacggtactgccgcagcaacatattttccaaacgtctttttcccatcagtaaccccaacaatcgcaatgatccttagtttactgacattcggagttgcgtttgtagctcgccctctagggtcgctattatttggtcactttggcgataagttaggtcgtaagcgggcattagttgtctcattgctgatgatggggctatctaccgttgtcattggttttcttcccggttacagaactttgggaatgactgcaattttacttctatgtttagcaagatttactcagggcattggtcttggtggtgaatggtcaggggccgttttagttgccactgagaacgctccaaagggtaagcgggcactatttggttcgtttactgaactgggtgctccaattggattctttttgagtaacggtttatacgttattttggaaaccgtattgaccaagtcacagatggtagaatttggttggcgggtaccattcgttgcctcagctgttctggttgtcttcggactttgggtgagaagaaagatgcaagaaactccattattccgattggctcaaaaacgggataacgtcaaaaaagcaccattggcacaggtattcactaagagctggaaacaaatcctccaaggaacatttattatggctgtttcctacacgttcttctttctactttcaacttggtcattgagttatggaactgccgtgcttggatttgatagccgtgaattcttgatgttattgatgggatcaatcgttgtatttgccggaatgattgtttattcgtcaattttgtcagaccgatttggccgcagaacagtattgcttgcaggaactgcagccatcttcgtattctcgtttgtatttccattctttttccaaggacaccaaaacgttgttggaactttattcttcttgttggttggtttcttagcaatgggagttatctatggtccagttggtgcaatgctgcctgaactcttcccaacaagtacaaggtattcaggtgctggaattgcttacaatatgtccgctatcattggtgctgcttttgccccaactattgcatcttggttagttggacaatgggggatccacgcagttggttactaccttgcatttatgagtttggtctcaatcgttgctttacttttgacaaaggaaaccaaatcagtggattacactaagtaaatataattgaagaaacgcaatcaagcaatttcggccttaaaggaggtggtggaaatgtcagatagcgacatttcaggcattatcaatattgtgaaaagtaaaattagaaaatggacgtgtcagttgtagttaccaagttagaataagattttcatggtaacggcaactggccataatggagggaaaaattatgactaatcaaaacgttaccttaaatacacaacaaaaatcatttgtccaagcactgtttaatgcttatcaaactaagcagccactaaaaagagcagactgggaaggggttgtaaccgatgatgaaacggcctatgcggttcaagattgcgttgcccagttaaagcagttaccaaccggcggctacaaagtttcgctgactagccagcaaactcaggatatgtttgatgctgatagcccactgtatggacaacaagttgattcacactttttaccatcaccagcggtcttatcattaaagcggcaaacaatggctccgttattagaagttgaattaggctttcgcgcaacggaagacttattaccaagcgatagtttagatgatcttcgtcataagaccaccgtttgtggaaccttggagctccctgactgtcggtttgctgactggttccccgacctaaataaatactgtgttatgagtgattgtgcagttggcggttacgtcgtgtatggcagtgagcggccagcagatgaagtattctcaactgttgatgatgctgccaacgtaagtgcgactctctatcatgatggacaaaaagaagcgacagggcagtctagtgaagtccttggtaatccctttaagtctttgcaatggctagtcggtaaacttgctgcccagggtaaacggttccgagcgggacagctagtttcatctggtacctttctcttacctccacacttaacagcaggcaagtgggaagctaagtttgaccacgggttcggtgatgtggttgttaatgtcaatgattaattagcgggttcaatcagaaaggaagtcttattatgactaggaaagtagcagttattggaatgggacatgtcggggcaaccgttgctcattacctcgttgcttgtggatttacggatgatttagcactgtatgacacgaacgaagcaaaggttcgcgctgatgcgcttgatttaagagatgcaatggcaaacctgccttatcatactaatttgaccgttaacgatgattcacaattggctgattgtgatgtggtggtttcgacccttggtaaatcgaagctagttgatacgcctgatcatgatcgttttgcagaatttaaatttacccgtacccaagtcccgttagtagcaaaaaaactggttgataatggctttcatggtaagctagtcgacgtaactaatccatgtgatgttattacctccatgtatcaaaaactgacggggctccctaaagaacacgtgctggggacgggaaccctgctagattcagctcggatgcgggcttgcgttggcgaagccttaaatgtagattcccgatcggtagttggctttaatcttggtgaacatggtaactctcagtttaccgcctggtcgacagttcgcgttttgggcaagcaggtggttgatctggctaaagaacggcatgtgaatttagctgatgtcgaagaacgttcgcgaaaaggcggttatatggtttataagggcaaaaaatataccaattatggggtagcaacagcggcggttcgtctgactaacgccttattgagtgatgcccgaacagaaatgccagtgtctaattaccgcgaagaatatggcacttacctttcgtacccggcagtagttggccgcgatggagtagttgaacaattgcagctcgacttaacagccactgaacaggaaaagttagcaacttcagctaagtacattaaagaccgggttaaggctgaagaacaacgagcagcctcaaatgacaactaatgctattaaatggtagattgtaaaattaatccgacgctgttcggacaaaaaagatcagcttcccttaaaatggtgtttaccacaaacacatcttttaggagctgatcttttgtctagtataacctattctgaacgaattaaaatcgaaaccttttgtgaactaggcctgtccaatatccaaatgagcgatcgcctaaaacgatcacctgccacaatttcttatgaattagctcgatgtgaaccttaccaggccgaagtggcccaaacagatgccgaatacaagcggtcacgatgtggccaaaagactaaattgaatgacaaattaaggcaaataattttaaaccatttacggctaagttggtcaccaggaatgattgctcacgaatttaaactagcgactaaatcaatttataattggttaaatcaagggaaaattgagttttctttaaatgatttgcctgaacatggcgtgcgccaacggcgtaaccttgaccaacgttctaaatataatcaatcattaggacggtcaattgaacagcgacccatcgtggttaatcgacgtaatcgcatcggtgattttgaattagatacaattgttggcccccgtgggcatagtaaggcagttttattaaccttaatcgatcgcaaatcacggttcctttgggcctaccgattaaaaaaccggacagcagtaactgttaatgaagccctaaataagtttctagcaacttttaatggcccggtgcatagttttacggtggaccgtggcactgagtttagtgggctagtatcacttgaagcacaatacggtattaagacctattactgccatgcttatacgccagctgagcgcggcagtaatgaacgatttaatcggaacttacgctatttttatcctaaggggacttattttgagcacattagtgctcaaggcttgaaaaccaccttactcgaaattaatcagagaccacttaaaatacttgactggcaaacaccttatcaggtcatgctgacaaatttgtccaaaaattcggattaaatttgcaatctaccatgtaaataaagatcagtctgttaaaatctttgggttttggcagaccggtcttttgttgaagtgaagaaaatttaaacattaagattatttttggctcgtgacaataatcattttgtatacccaagtaattaatcgagcgttgcaagtatcaaagtgtctccccgttaaagggcttagatatattagatgcaacttttttgacgtcttgaatatataatgagagcgtaaaatatcttgtgtaaatgcataaaagatttctgaattgtatagaaatagggaatgccttcccttatgatatttagtaaccacagaaaacatcataggaggca

SEQ ID NO: 19 - DNA, 33842 bp, synthetic construct
  source 1..33842: mol_type = other DNA; note = Lactobacillus plantarum PDA6 - Contig 19
acaacttctctttaatcgtatagcgagaaccttttctgcccatagaaaaactcctccttaggtaggcaagctttgattatttgcttgtctacccaaagaggagtatatccgcgttcgttagtcacagcggtgtttttgaatttctaatgattagtgattttgtaatcgatacttgcgaattgccataatcaatgacaacgtgttgagtaccaatgataaactgctgaggagcaaactcgtttttgtaatacgcatgagcggcctccattgattgaatttgttaattctagtttaccggtattacgcactaaaagatactaaaagcactaggtgattcgtgggttgtgcgatcagtggttaatcatttgacacggtctgttcggcctgggatagcgcgtccttgactgcggccttgatggcacggctcgatacagaagcgccggaaactgcatccacatcataagtgttagcagccaccatttttgccggcaattcggcaactgcctgaccaccaacttcaccagtctcatgttgttcaactacttcaacatgagttaattgttggtcaacatacgtgatacgaaccacaacttgcccaccaatgccatcatctgagcgccctaagtattggtgttcaccaactgtgatgtccggtgatgcttcagctagcaaatcattggcaccagtctgatgcaccgaagcactagtattcgcatccggcttagccactgctttttcatcgactaattgtgtcgtttcttccttaggtttagctgcattttcaccagcgatttttccaaaaatcaggcattcagctaaattaccgccaccttgatactgatttgcacaaataccgcccaattcacctgcaccatacaagtgcggaataggttgctgatttgcatctaaaatctctgcccggtcattacgacgtggtcccccttgggtattaagtacgttgtttgttaacttaagcgcataatatggcccaccatcaaatgcccgcatcgtatcaacctgccgattaaacgcgtagtcagtaccagactcgacaaaataattgaaatcatgaacggtcttggtaagtaccgtaccatcaacttccataactcgtgctaagtcgtttagagtagtggccttcacaactaaatcggtgagattattaatcggcgtatattgacttgctaacatctgttgatactgagtctcatcaaaaaccaggtatggatggacatttgtccgcggtactcgccacattccatgatcataaatgtgaccgtgccggttggcttcactctcatcaaaataccgactaccgtcatcagccaccgtaataacgctaccatggttaacttccggccagcctaaaatcaagcgaccacgttcaccttgtggtacggcaatcgaaagaccatgtaaaaatccgagtgattcataattttgcatgtgccaaaagtccgcgccaacttcttgggccatcttaataccagcacccttattaaacagcgtgcctaatggtgccaagtgctcagcaccaaggtagtcctggatggcttgttgattattttcaaaaccaccacatgctaggactacaccattggtagctcgaacattaactaaacgatgctgacgttcgatttggacaccgataattgtattcgtagtgggatcttgaatcagatgttgtgccggagcactaagccagacatcaatctgttgctgccgatctaacactttttgtcgaagaattttccacaaagctgcatcaaaaatgccatgatggacagttgtaaagtcataggattggactccatcaaattcaggaaactcatgaactgcactgtctaatgaaattggagaatcagcagctgtaaaatcatttttgacactcaccgggtcaacattgagatacttttgaacatagtcgcgcatattcgccatgcccgctacgaaagtatcaaccatactatcgtctaattgcatgggtgccgttaagttttgataatattttttaccctcatcgaaactatctaccgttcctaagagttgggcagaataacgggtattgcctccttcatgcccattcggcgctgcatcagtgagcaacaccttcgcatgtgcatccgccgcaaaccgcgctgctgtcgcctcggcaccaccaaagccaataactaccgtatcatattgataatcccatttaacctgattcatttttttgagcatgctgaccaccctttcaaaatccatttaacgtattctaaagcacaattaaaattgatatttaaatcacaaacagaatcattttttaactacatctgtattatataaccgctttcatttttatagaaataacaatctgattatctgttattacaaatgagtaatgggttatacttgattttaataagattaagcattaaaggtggcgatttcatggaaaataaattgttagtatttttagaagctattcaacagcacaatagtatgacgaaagctgcacaaagtttattcatcagtcagccgtacattagccgcacaattaaaagtgcggaaactcattttgggacccccttaatcgaccgcggctatcatccacttgaattaacttatgctggagaaagattactgacttatttgcaaagtgacgctcgtctccatcagcgaatgaacactgagcttaaagaaatcagtcaaaataagtatcaaagtatgacgattgggattacaccaccgatggctaatgcttggtttagtcaaacactacctgctttttatcaacgttttccgaacattcgcactaaaatactagaaatcacaacatcaaaagcagaaacgttgctagctagtcatcagctagacttttttattggcaaaacaattcatcaaactaacgtcaaaaccatccctttgcagacaatttctttgtatttagtcattccaaaaacagccggaatatatcagtccaatcaattttggcgaccgttcacccccaccattcttacaggaatgaccggtgagcctgtcatccgtgcagtcggtgaagctcgctttcaagaactggttgaccattactttgccgataaaggcattcaaacgattccactcattgaagtcgataactctcgctttgcactaagcttgacacttcaaggacttggtagcattgttctagccactgcaatgttggcaagactagccactgaaccagccaagtaccctatcaatgcgttcaaattaccaacaagcgagctcagccttgattttagtattgcctacttaccaagtcacgtgctagctaaaccgattgcttatctagtcgaacaagcttgtcaaacctttaaccctgcgattgatttttaacataaaacgcaaactgtcagcatctattaagctagatgattgacagtttgcgttttactttcaaaataaatcaccggtagtaaatcatgttcaaccccaccagctgttgcattagttgctcattttctggtgatagtttgatttgttgctgccgcagacatttggagatgtctaagttcattctgtcgaatactcccagtactgaaccagttcgttgttccaatagttcctgataataagttgccagcagctgtcgtaacggttgctcattcgtggtatttagattagcaactaaatcactaattatgcccacagcaacacgtgcccgatcctgccccccgctgtaccatttcaccgtcatatctgttcgactccttttacgcaataacaactgccaccatggtcgctgaacaggtcttctgctcaaacctaataactcatccgtcgagacagcaaatagtttgctcagtgctaccaacaactctaaatctggataacttttccctaactcccacttggaaatagtttgccgtgagacgtgtaaccgctccgccaccgtctgctgggaccattcatgctgttgtcgttgctcatttattttagtaccaatcacaattttcatcctacccgctcctctattaaaatactagactattgggtgcaccaattcattgcaacacacttaagcgctaccgcaacggttggttgcaaccactcaagatcaagtctcggtatgaaaatgttgatacaacgactttcctgaaactaacaattccacaacttgttgaggatcatcaaccgtcacaccttgtcgttgcaaataactgacaaattgcggtaaatagtcgctggccttcaacgcacattccagctgataagtttgggcattagtctttaaaatcaattgaaaataatccggattgaaatcaaatggtgaaagtcgtttgcgacaccgataactgatggtaacccgctgcagatctgtatagtggattagttggcaccgtggacaattgaacacaatttggcgaaacttcgtcaatgtcgatgcagcatacgtatgcaactcaacggtagcaggctgaatcacccagtaactattgattcccactggaacgaccacaatcaatccaacaatataaagtaataaaaagagccaccacggctgataaccaaaaccagtaaataatagacaaacaaatagccaaaataatccgagacccagaagtcgcccaaagcttagtcgtcgaccaacaatatatggttttggaaaaaaagcactaccacgaactaattcatccaaggatagattatacagatccgacagtgccagtaaattatcgattgacggaatcgcctttccgcgttcccacttagacaccgcctgagtcgtaacaaataacttggacgctaattgtgcctgtgtcaatccatactgacaacgacgcgttttcaataatgctgcgagtaacattggctcgccccctttatgatttcagcttaatcttcaaccacgatcaaaccaatcaactcatggttgtttagtcacaatcatgcatggcagtcataatttgttgaacttccgtggttaaatcttgttgctcgccaattaagacttcgttagcaacgcccaacgtatcatgtggaagccaccaccgacgcatgtcttccacaccaaaatcacgatgacgcttttgatgacgcgccaaggtcgtggcaaagctcacttcaaaataataagtaaggacgcgtggaaacgattgactaagccgcgccaacatttttccataccgatcacgtgctaagatgccttccacaatgactacaggcacacgtcccagcccataacacgcaatttattcaatcagaccaattgaaatatttcccgggtaatcatgactcatcagcatgtcgcgacgaacgacatcttgggacactagcaacgtatgatggcccacgcgtcgttgcaacgcctgcgctagcgtcgtcttgccactcccagaatttccccgaataatcaccaaagttgtttccatccacatgtcctccactcattcctgtatcttaatcataccgcacagctaacaaaaagcgttagccaaattggctaacgttcgctgatactatttggctttactggcgttacgtcgggcatcatgtaaaatcttcaatgcgcgtttccgcgattttaagttggtcccccgtagacgcctgcgcgcacttgctaaatcttgtttttccatcatgggtgcctcctgataaacagtaattattaccatttaaattataatcaatcttatgcttacgtcaactattatgcagccagctgacattgacagatacaattagctcccaataattaaattatcatttattagactaacggcaatgacaatgttacccttaaattgtcaacgacattatataagtattttgaaggagtggggatctttgaaaccaaacaatgttaataatcagaataaacgtcaccaatcgcgatgggtaatcacgagcgcaaccgccatgatactgacaacgttaacgattgccagtcaggcggcggctgccgacgatacagtcacgaccacaaccaacgaaccgaccaacagtcagttgaatacgaatactcaagttaacgctactcaggtcaatttgaaagcggatacttctacatcagtatccacgataaaatccgaccagtcagcagtcgcagccacgtcacccaccacatcaaccggaagtccctctgagcactcgtcgtcagtgaacaccaacccacaacaacaatcagcaaatccagcatcacaatctcaagcaactaccacgtcagaatcaacaccgaccacagatattaagcacccaactcaaaccgcaccagctcaaacagcctccgcatcaactactgaaccaactaccgaatcaaacactgaatcagcgactgatagtcaagctaaagcaacgacaaccgataatcaagcttccaagcaaccaagccagcaagccgtacccgcgtcgtccaactccactaccaccgaggtgaatactcagtcagcgactagctcagcgtcaaccgatgataaaattgttaccaatgtaaaccaggaaaagctggttttgaaaactaaccaaccagtcgtccgtgccattagccgcaccgcgtcagaaaatattaacgattggatgccgaacacgttattgcaacaagaggtactcagtcaactgcgcaaacagaacccagatcgtacctggaactcagctgcagacatcactaaggcagatatgctactactgaccacctactatggcaaggacacttatatcgacggcaagacttcctactcattagaaggactgcaatatgccactaaccttacgacagtctggctcaacaacaacttgaacgcaccgtctggcagttactatagtgatgtcactgatatttcaccattagccaacttacaaaaactccaagtggtcaatattcagcaaaaccggatcatggacatttcaccgctcgcaaacttaaagaatttaacggaggtcgatgccgcctataaccacatttcagatttttcgccacttaaaggatttaaaaatctgaaaggcacattcagtaaccaatttatcaccttaccacccgcctatattagtgcagataataatattgcgacgctggcgattgattgctatttgccagatggctctaaggttcaactgaagcccaataatggcgtcggtgaaactgttttctacaaaaacggtcagctttacgttcgctggtactttaacggtgcgggcggtggtaattacgacagcaacggtcatatctattacacgaatatgaagcctcagcaacccggaataacaggtccgaactttaacggtaccacggttattcccatggccgattattatttcatgaccgccgcttctgacggtaacaactttgtcgtcgtccgcccgtacgtcttagccgccactgctgcgcccatcacggtcaaatacgtcgacgcgcttaccggtgaatccttagtcaccaccgacctcaccttaaacggcatcgtcggtcagccttacacgactcaacgcattgatgacgacctaccaaattatgactttacgaacattgttggcaatgccagtggcgtcttcacggcggatgcccagaccgtcacttattactatactcgtaaggacgccggcgacattacgattcacatggtcgatactaacggcaacttagtctacgagccgcaaattctacctggaaaacacaatctcggtaacgcctacaatttagatgcgccaacctttgaccattttaaattacagcaaactatcggcaatgcggctggcgttttcaagactgatccgcaaagcatcacgtttgtctatgtccgcttagacgccggtaacattacggtgaaatatcaagataagcaaggaaaccaattaaaacccgataagacaatttccggctcccaatcactcggccaggcttatacgactgaaccgttggacattgaaaattacaccctgacgacaacgccgacaaacgccacgggcactttcacagaccaggaacagacggtcatttacgtctatgtgcgccgcgatgctggccagatcgttgttaagtatcaagatagtgctggtaacccactagcacccgacaagcttttagacggtaaagaacagctaggagcagcctatcaaacggaagccatttcaattcctaacttttacctagtcgccacacctgcgaacgccaccgggaccttttcaaccgacgcgcaaaccgttatttaccagtatgcacgttcgaatgccggccatatcacggtgaagtatcaagacgctaacggcacgaccttagctcccgacgacgtcttaactggtgacggtcagctcggtcgcccctatcagactagcgccaaggcgcttgaaaactaccgcttaattcaaacgccggcgaacgcaactggacaattcagcgaccaagcgcaaaccgtcatctacgtctacgctcgtgaagatgcgggcgatatcacggttcagtatttagacgaaaacggccagcagttagccgccgatagcgtattaagcggccaaggtcaattaggacaaccctatgaaacgtcgccgctgaacattaacggctatacggtaaaatcgacacaaggtaacacgactgggacctatactgtacagccgcaacgcgtcgtttacatttacgaacggacggctggacagtcggtcactgtcaagtatcaggaccaggatggtaagtctatccatcctgacgttgttctcagtggttatttgggtgacagctactcgactaaacagctggttatcgatggttacaccttcaaggctgtgcagggtgacgtcagtgggacgttcggaactaccacgaagactgtgacctacgtttacactgaaaacacccccacgattccagatacccaaggaaccgttacggtgcattacgtgaccaaggacggcattaaactaaacgaaccaaccgtgctgagcggcaagacgggaaccacttatcaaaccgtgcccctgacgttcactgatcatgaactcgttggtcagccggaaaatgccacgggtctcttcactgctgataacgtggacgtcacgtacgtctaccaagcaactgacacgactggtaccgacgatattattgatcccgaagaaccggaacaaccgactaagccggttgagccaaccacacccgagacgcctaacgaaccaggaacgaccgtaacgcagccggatcgtattaaaccgactcaaccagcggtagctgtaaaaccagcagcgaccgtgaaaccagcgcttaaacccgcggccgcccaggcaagtttggtcaaaacaacgagtcccgtcactgaacactcagcccagttaccacaaaccgacgaacagactggcaaattagcggtcatcctaggactgttattatccgtcgtcacgttcgggttctatggtaaacatcggcaatcatagcgtcattaggtctaacgaaaacgacacttcgaaaaatgaagtgtcgttttttctgatcaaaggtgcctataatgaaattaatcattataattccaatgaaggaagtcctaatcgatgaaagtctatctcattcgtcactccgaaccaacttaccaacaggtcactacagctggattaactggtttcggccgtgaactcggcggcttaaccgaccgtggtattatgctggcacaacaatgcgcccagcagccgttatttgcacaagtccaattaattctgtcgtcaccctacacgcgtgccttacaaacggcactggaaatcgtgcgttttaatgatattccactaaaggtcgaccttggattacacgagtggctgcccgataacacgggtagtcggactgataccgatgaacaagcggccacggcctacaagctctatcgccaacacgccggcaaacgcaccaccgctagtcccctcccttacgaatcggcagctgaaatgaagacccgagttttggcaactttgaataagtatgccgcatcttacgattgcatcgcctgcgtcacgcacggcgaggtcatgcggcagtttggcgatcagaaagacgtggattattgtggtgtgcgtgttattgcggttgattaggtagttagggaaacattacttcatttgctatggttaaccagattatgagctagtcaacttggcatttttgcttggcttgcgaattggtatttttcaaaactgcttctacggttgttattcaaataatgcagaagcacccacaaatcagcataattatttttaatcttgataattatactagtattaaaccaaatgtggcataattattgatttatactctccgggtgcctgaagccaactttcaaactgtacttaagatgattattttatctcatttcactcacgctaaatgccccatatctaatcataaccattagtttaaatgcaatgaattagctagaaaattctttactattttaatgactaactttgggacttgctcattggcagcgataaggttacatatgttctttaataaagcaatgattttctgttgttcagagataactggataccatacttctatatttgaaagatctctcaggtatatacctggttgcgccgaaatagatgttactctttgcaatattttttttatggtaggcaattgaaagctaaacatcaaaaaataattatctataatttcttcttttccacgtattatggctactgaacgttgaaaagcgattttatctttggactgtctataaatggctgtgcgccctatagttccaacaatagtcaaaagaaaatccccatcatttaatgaataccctttgtatattttattaaaatcgttaatactaatttgtcgatcatttttactgtagacaatcctatttgataggatattttttgcgcttaacaggtaagctccatagtgctcaatatgtgtaccatgtgtaccatccttaattacactagttatctcttttagcttacgctgctcccaagtaccagttcctaatatatgaccgataagcctgaaaacttgggagcagcgtaagctaaagaatatcgccataagagttcggggaaatgacggaagaatggaattaccaactctcacaatttcggctacacaaggatggctgaatcagaaagatcgattttctgaaaatatcgctggaaaagaacaaaaaaactatactttattaaaaaagggacaattgtcatataatcatggaaattctaaaactgcaaagtatggtgcggtattcaagcttgatatctatacagaagcattagttccacgtgtttatcatagctttacagttaaacataataattcggcagatttcattgagtatttgtttgcaacaggaagtccaaatcgtgaattgagaaaattagtttcatctggtgcaagaatggatggattgttaaacattagttttgatgcgtttttcaatattaatttacaagtaccaattgcaactgaacaaatgaaaatagctaagttttttagaaaaacagataaccttatcgctgccaatgagtataatctgaaaaacgccctcaacattcgaggacgtttgaatctgcacttattaacgtaaatcctattgtctatattaggcttgctaaatgtttcatgaccttgtcgttatcctggttttctaattcttgaataatgtgtaaataagtttgctgtgtagtcgtcatattagaatgacctaaccgtcgagctactgaggcgatactaacaccagcatacaataataatgaagcatgtgtatgtcgcaaaccatggactgaaatcacaggaatagatgcgtgcttacataaacgctccaaataatgattaaccgtatcattataaacttttgcttgaacaaaaattggttgatcttcgggcagctttttagtcaactgggaaaattgaatcacagtctgccaatccagcggtactttacggactgatgagttatttttggtaggtgcgaagtcacttttggcagatttataatcccaagttttactaattgaaagtgtttggtgagcaaaatcgaaatcagcaggagtaacacctaaggcttctgcaaaacgaattccagtcttagcaatcagcaagatgaagtagtcccaattgacttcgttgttcaggtttaattcatttaacaatgcctgcaactcatactgatgtagatactttgttttatgctgacgatgcttaattcccttgataattgctttccgtgtcgggtcgcgatcgataaacccttcttccaacgcatcaataagtgaaccttttaaatgacgatgaaagtccattgtcgtttgccgttcatgggtttccgcataatcattgagcaattgctgatatgtcagccttgataaatcagccatctttagatccggcgctaacgttaccaattgccgatgtgacatttcatatttgcgataagtcactggacggaccgcatctaatttatagagctgcatccactgaaaaaaatactgatgaaacttaacatgctgtgccataagaaacctccaaaaaatgagttaacaaccacttgtgcagccgctaactcatttatacatgaataattattcatttggctaaaattgacacttacaaataaattaatactatcgctattcagcagggatagcccgtaaaaaatccataaatttaaacaaacatattttgcattaaatatttcttcaactttttgagttgatttagtttatcttcattggcagcgataaggctgtctattttaaatatggataatcctactttagactgttcgtcaataattggaaccagcaaagaagcattggctaattttgaactgctaatcgcaggatagctagttccagtggataaagcaagtattcgattaacaaacggcgtagtctgtaatgcataaaatagatatcttatatcttgcttggttctaatttgtgtataccctgttgaaaaaacaacgttatttttgtttgtcaaaaaaagcaagttatttttttgatatggtcttacattttggaaaaaaatatcgcctttttttgctaatcgttgtgccctagatggcgcatcatcttttgtcactgctttatactgtgtgactctattttgacttactgattccaaatccacataaagaaaatgcggagaaataactgacttcggattaatggtcgcaatctgacaaagcttacgctgctcccatgggtcagtgaatcccttgaagcgccattcctgagaaaaaatcttttgcatcatcaactttttgagagtttttaactgttctagtttatcctcattggcagcgataaggttgtcggttttatcaaaaataggagctatcatactttgatttcttttgctgggatattttaatactacttgtttcaaatcagagttgtgcaaatgaactatagattttccctgtgcccttttaattagctctttgttttgctgaccattagaaatacaaagtgccagaaaagaactatcaataatgtttattttgggcttaattatattaaggtctcctcccaagacagccccagagatacatacatgcgacgctctggcaatgtcttcggctgtctcaccggaagcaggtacaataacatcattacattcgctaaaaacagaaccaggacgtactttcacaaaagtatcttttatagtagtaatattcacctgataatttgtatataaccgaccatataagacaataggtgtaccttgatctataatatctttcttcgaatagccggctcccttcgaaaagtcagctaataatttcaacttacgctgctcccaagggtcactaaagcccttaaaccgcacttttggcactaaattttcgtttttcattgtaacatcctcttaatggcctcaagctgctgttgagcgacagggtcagtcgccactaagtcggccatcattccggataattcagattgtaggtcgttgattttggcatccgcttcgcccatttccttaaccaacttatccacatcaacaggtggttcctcttcgaatgtatcgacgtatcgcggaatgtttaagttatactcgttttccacaatctcagctacttctgcaccatgagcatacttatccacatcttcacgtttttcaagggtttccaaaatcttatcgacattttcgtccgttaggttgttttggttcttacccttttcaaaatcattagacgcgtcaataaagaagatatcctgacgttcgcgacctttcttgaagaccaatacaacggtcggaatactagttccgtagaataagttcgctggtaatccgatgacggcatctaagacgttgtcatgttcaatcatgtactgtcggatctttccttccgcagcaccgcggaataagacaccatgtggtaatacaactgccatcgtgccttcattatttaagtgatagagcatgtgctcaacaaacgcaaaatccgccttcgacttcggtgccgtcttcccatatttccgaaaacgttcatcatctaatttatcatctggattccacttagccgaataaggtggattggcaacgacagcgtcaaaagttagatcatcaaagtgatcttcctctaaagtatcgccttgacgtaaatcaaaccgattataactaacctcatgcatcaacaagttcatccgcgccaagttgtaagtcgtaccgttgatttcttgaccatagtagtttccaatcgttgcgtaattacccaattgtaataacagcgacccggagcccatcgtaggatcataaaccgtcttcaaacgatctttaccggccgtaacaattcttgccaataacttagaaacttgttgtggcgtataaaattcgcctgcctttttcccagccgaagcggcaaattgaccgatcaaatattcgtaggcatcacccaaaatatcaattttaatatcttgttcaccaaaatcaatattcgacaaggatagaatcactttggcaatcagttcactacgcttggcaactgtatttcctaaccgtgatgactgcaaatccaagtcttcgaatagccctttaaagtcattttctgactctttgcctaaagtcgaattctggacttcgttgatggcattttgtaacatttcaacgtcaaaatcgccagcgttaatcttcttgaccatagttgtaaacagatatcgtggttcaatgaagaaacctaagacgtcaatcacttcatccttcaaatcttgcatcaggtcagcatcttgttccgcatctgcaaagtcaacatcatcgtcttgaagtaactcatttgcgtaattttcaactttttcagacaaaaagcgataaaagattaatcctaagatatagtttcgatactcactggcatccatgttaccgcgcagatcatttgccacagcccataatcttttttgtagttcagcctgttgttcggcctgttcaatatgactcattaaattcattctcctagcttagtgaatactttcggtcgatagtcgatacaaaatccttaatctcgcatttggcctgccgtttctctcgaaagccgagcccattagcacttaacttgtcaataatctctttgtccttggtcttaccgtagaagttgtagtcagaaatctgctcgttaacgaagtcttccgaaaggtggtgttcttgtgaaaagcccttaatggcagctcgctggctctcggccataaagttactcaacgacatgccgatatcatcgtctgtatcgagcgttggcaaaacttcattcaaaaattgttccaacaattcaaccttcgactttaattggtcattggtcgcattatccaacaaatgttcaattttctgaatatcttgcttacgttcggtcgacgacattaagtcaatgcctgagattaagttcacaatatagtcaacattgatggtatcagtctccaatagactgatatcaaagtcaacgtcatctaatattgagacgcgctcctgcgttttacgttggtaaatcgtttgataagccgtaaaatatttgcccccgaaggcttccatcagctgatccgaaaattcaggttcatattgcgcccattcaaaatcatcatacacgcgaatacgattatatacccggaggaccgcccgaaacgccatcacaaactcatatagtgcgtcatcgcctcggttatagaggtcgtccactgactggacatctggagtcaccgtcagtaattggccaatcttgtcagtaaattcagcttttaattcatcataatctggtgctaagaagccggaactgtccccgtctgaaaacaacgctacagcctcatccgtcttatttttgatatttcgataagcaataatatttccgaatggtttttgtttgccctcaacacgattggttcgagaaaatgcttggattaaaccgtgccattgcaaatttttatccacgtatagtgtggacaaccgtttggagtcaaacccggttaggaacatgttcacaacaatcaaaatatcaatattatccgtcggcgtttggtcattatgatcgcgcatccgcttagaaacatccgcaaaataatctttgaatttatccgttgaaaaatccgtaccgtacatttgattatagtccttcacgacttgatctaatcccatccgtgaagtgacatcatcctgtttttggtgttcctcgttgtcgtcctcattggcagcccacgtaaagattgtcgtgaccttcaaattatgatcaggatccaactttctaaacaactgatagtactttaaagccatgcgcgtattcgctaccgtaaagattgcattgtaatgcttattctttgtaatgtggctatggttcaacaggatatgctcaacaatcttggtcaatcgctcctcggactcatagacctcttgcgtatcaattcctggtacttgttcgtctgtaatgtcatgatcagtctcctcaaaggtcgacagatactgaatcgaaaaaccaagcacgttaccatcacgaactgcatcacgaatcaagtattgatgcaactgattctcgtacagatcttttgtggtccgcccatcgggtcccatattctgttgaaaaatcggggttccagtgaacccaaagtgttgggcattcttaaaccaatgattcacgttttttcgcatttcgcccatctggctacgatggctttcatcttcaatgaagatcactttgcggtcatggtacggtgtcagaatatctttataccgatcattagagaccgcattattcatcttctgaatggtcgtcacgattaagccattatcattagaggacagctgcttgactaatgcagcagtattgtcagtccgatccaagggactctggcccccagttgtttcaggcagataggcactaaaattctttaccgtctgaatatccaagtcggcacggtcaatcatgaagataaccttttcagcatcagtttcttgtaataacaactgactggccttaaaggaggtaatcgtcttaccggaacccgtcgtgtgccacacataaccattttcatgggggtgatcgatagcttgcttaataattgcctcagtggcatatatttgataaggccgcattaataacattttatggtcactactatcgaacaccgtatattttgcgattaaactatgtaaccgtggtttactcaagaaagtggtcgtaaaagcgtccaagtcattcaaccaattattatgttcatccgtccagtagaacatgaagtttgaatttaactcaccatcgccattcgcaaaataccgcgtttcattgccattggaaatgacaaatacctgaaccagtcgcatgagttttgcttgtgcgtacgattcagttcggtagcgaataatttgattaaaagcctgagtaaattcaaccccttgccgcttcaactcaatttgggcaattggcatcccgttgatcaagatcagcacatcatagcggttctcatgacgaccttcaaccgtcatttgatggctaacttcaaaaatattctgatcaaattgttttccattaaaaatttctaggtataagctgctatcatcatcacgtttaatattaattttcccagttggctgaacaaccgaaccacgtaaaatttgggcaacttgataatgcgtcttagcgccaatcaaatcatttaatacggcctgaaattcacggtcactcagtggtgttccctttaaacgttcttgattacgttcactcaagaccgcacgaaaatgtgtgtttagcgtttcaacatcgggaatttcaacgtaatgatagccaatgctttgtaactttcgaatgaggtgattttctaattctgcctcagattgatgtccacttgccatcataggtcctcccatctatacgactattaattagccgtaatactaatcaagtctactctccataattaccaatatcatatcatatttaactgacgctgtaggccagtgttagttatttctatcaattattaaatcattggcaataaattaaacatggtttgattgcaaactaaaaaggtagcccgcgctgaaacgtccagcaccgaactacctttataacgaatattaacttattttacaacttccgcgaccgctgcattcaccgcatcacgttcatcctcaactaaggcaacgcgactggcgattaccttcgtatccatcttaatttcacgcgttaaaccaggcgtattgatttttggttcaaagaacgccttgaattctgctaaacgttcagccgtatggaagacccgtgaaatgacggtgatgtaagtggtaaattccatgtcaccaccaaccgtggcttccaaccatgaccattcgtcgcgaatccaatcccaagctgcttgttcaccagctggattagccaagacgccgcggaaccaggcccgcaagtcttgtggcttaatcgtatccgcatcttcaaacttcacaactaactgtttgattaatttggggtccgtagttgcggtcaatgcgtcacaaatgtcagccttgtaactagcatcagctgtctgccgtgacgccgtcaataaactatcgaataagtccttgctaccaaagttcttgacttcattccgtaaaatgaagacccgcacatcggctggtaaggtcgctaacttatcacggttaccttcgaataattcatgggcagccaatacggccgcactattcttggcgtacaaagccgcactcaaaacgtatggccgcgtcaactgatcatcgttagattcaccagcttgtggcaaccaccctaaccgtttaacctgagcggcactcaattggtcaaataacgtttgtaaatgcttttcttcatcagaatctggcgtaacaaacttacgtaagttacccgcaacttggtacaacgctgcattaacgaccgttgaatggctggctgcaaaccggcttaataatggcacaacggctgcgtatgagatttgacgaccttcagctaacaagcgtaagtcttgtaacaactgtaactggtcaatagccgttaagtcatcaacatgcgctagaatatcatccaataacgtttggtcatacttgacgatgaagtgggagttattcccaacattcaagcggaatggttgcccactcgcatcacgtaatttggcataatcgccgaccgtcacagcttggtccttcataatcgctggtgccgcctcatagttgctattcaacggaatctgccattgacgaccgacttcttcaccttcaccgatgaagaactgttgttgtgacaaggtcaactgaccgtcaacaaccgctgccgtgaccactggatagccaggttgttccagccatgaatgcatgatgtccccaacttgcatcccagaagcatccgctaaggcgttccacaagtcatcacctttggcattaccatatttatgattgataaagtactgcttcaaacctgctcgtaaggcatcatcaccaactaaggcccgcgccattactaacatccgcgcacccttagcgtagacaatcgcaccgtcaaaaatcgagtcgatttcggccggatcttccacctgaacgtggactgactgaaccccatccgtggcatcccgttgaagcgccattgatgcttcggacgtttggaaagtttcccaaatatgccagtctggttctaaggcatccgtcgccacatattccatcatgttggcgaaactttcatttaaccagaggtcatcccaccacttcatcgtaaccaaatcaccgaaccattgatgggcaagttcatgggcaatcaccgtggcgacccgttgtttcgtttcgagggccgtgttgtcaggatctaatagtaagtaggcttcccgataagtaactaagccccagttttccatcgcaccagctgagaagtctggtaaggccaattgccatgagtgtggcaatggatatggcgtctgataaaaatcttcataaaattcgattgagcgcttagcaatgtccagagcaaagtcgagctcgttagccttgtgggccttagtaccgaaaacaccgatggtcacgccactcttggtcttcgtctgcttgccttgtaattcaccaaaggcaaacgcaatcaagtaagtcgacatccgcaccgtggtttcaaagtaatgcaccccatcggcttcatgatcttcgggcatgttgcttaagattgtttcaccatcatgttcatcgtacttgatggcaagatcaaaagtcgctttagcttctggttcatcgacacacggaaaggcttgccgggccgcggtcgtttcaaactgcgtcccgattagttctttcttcacaccgttgacttcgtaatatgatgggtagatacccatcatcgtgtccgtcaatttggcgctgtacgtaatcgtcaaagttgtttgaccggccttggcaagttcaattcgaattccttgaatcgcatcatccacagtaaagggcacgtccgcaccatcggcttggacaccagcaatggtcaaaccattctgatgaatcagcacttcctgcgccttagcatccccggtaatcgttgacttccccgaaatcagcttatccgcccggttaatattgatataaagatcgtaatgttctggttgaaatgtttcgtaaaaatgagttgtggttgccatattattctcctcgttttttaagaatatattcattatacgacaattgcgggtggaatgcgtcctctgccgcccatgaatttgtcacgcgcctagcaactaattctcgacaacccccatcactaatgatgacacggttccttgcaccgtacgatatcgataatcattagtgtaaacgacgatattacgccgcttgtctaaagtcatcaataatttcttcaaactccgcatccgacaacaccggctgccacttcagcgactgacccaccggctccaacatgatgtagcgacagctatagcggcgttcgaattggaccgtggtcggcaataattcaacatggcgcgtgtcgtcttgaatccaggctgtgggcaaccaactggtcacgcgactagcatcgacacttaactcttgcaactgttcggcaaaccttgtccgcatcagtaacggcgcgtccattggcgaaccggccacgtcaatggcaacttgaaaatggccgacgtatagcgctcccaaatcataaatcaaacgttcatgcttatgtagcgcaattgcaccggtgactggttgccacgtagctgtcgctaaggtagcctgattgatcttggtgaccaccaaataacggcgtggctgaatggtacgggtagttagtggtactgatatatttgcctttgtcagtaatttaggattggcagtaaaacattggtcagtaagcttatgaaacttgtgatcatcttcattactaaaagtaactgtcattttttaaccccatctctatccgtctaagttgctaccgaataccatcttccaaaatctaatcatgaaccagtacgcgacctttcactcgtcagcttaacgttcgtattaagccgcttctggctcccagcgttcaaaagcgccaatcagattctcagtcatctgtaactcgcccatcacgttgactaatgccgactgggcattcataaagagtgtcgagtgcacaaaccgttgagccttggcattctcgatcagtcggcgtacctgtaaccgccgggccgttagcaattcagtttcggcctgacgtaatttttcacgtgccgcctcgtagcgataggccgcaatctcggctaaggcagccgcaatcattgaccgggcgctgccgattttcaaaatcatcgtcatcgtaaggttgagcgtgtgttccgtatttttctgcatgtctacaccttttttctttgtatttcctactctttgaccaatcgtacacacttgtgttgacggtaatcttcatcatcgcgccattcccccaaatgacagcaatcatgatcgacaatcagctttaaaatgtcgtgccgttcacatgaatgcgccggccgttagatgtcttgacaccgttaacttatgtcatagtatagcattatttttagaaaacaattccgactttttcaatatatacataaactttacaaaatgaaaaccggggcaatttacgtgcatttgtcccggcttttatattaatattatattttcacagtgattaatttatccctgcccgcactaccgatcatgacaccctcgattaatctaatgagtcagcggccggactggtctttgattcatctccatattgccagtcacgcatttgatttgccgcggctgctgaaggataggcgttattatcgaaccaggccccagcaccactagcattcattaagactggaatttggcggccatcaaaataatgataacgcacgtattcaaagttaccggccccagcagtctgctcggcccccataatatgaatccatttttgtccctcagctgccacataagatagcttcaacccgtcggtatcattttgcgtcatcgaattaatcttgtgatcgtacttattatagtaataccaagtcccctgataactttgaggccattgattagccttcgcatcacgactcatgttcacgttcagcgcactatctgtcagcgtcgtcggtcgactgcccgtaatgatcttggcaaagccggcttgcaaagcactgttctgcgtgtcatgaatgatcaactcgtccccgttggtcgtctgagtcacaaagacgactggtcgccgatgatggaggcaaaagaagtacgtgtttggatattgtgcttccgccttaccacccgttgcgacggccaccacttgaaattcactacggtcttcgccgtccttggaccacttgagatccactgactgcgagccccacttgattcggcctgctaagctaccattaagcaaagcattgggaaaacgaaaacctaaatggtcaggaaccttgtcatcatacgtcccgacataggtctggcccatctcgcgttgccaagcggccataaacgttgataaagccgcttgcttgcccgtattccacaaggttgcctcagccggtgatgaagaatcactgctagcggtacttttttggctagcagcctgctttgccgctaccttggttgacgttgctttttgactcgtcttgggcgctgacgacttgggcgacgtcgtgcatcccgctaataataaacttcctaataataatccgacccacacttttttcatgttgctcctcaccggtcccgtaccggtatccccctattcaataattacttttatggtaccaaaaaaagtcggcattgtgctgggcgttacaatataaatcttcacccatctcacttaccgactatggctatttacttaatcgtgatatttaacgtccctaaatgtgtaatctgaccgcacagttgatcgccggcttgcaaaaagacttggggattgcgaccaacgccggtcccactaggcgtcccggtaaaaatcaaatcacctggttgtaactcacagaccgtcgacaagtagtgcaccaaatccggtaccttgaagatcagttggctcaacggcgcttgctgcatcgtctgaccattgacggtggtcgtgatcacctcatcgtctaagttagctaactcatcgacggtcgttaaccacggcccaactggtgcgtaattttcaaacgatttacctattgaaaactgtggattatcattctcgaactgaacggctcgatcagataagtcttcaccaaccatcactccggccacgtgcgccattgcatcagccgtcgcgatatcgcgcccacccttgccaatcatcacgactagctcggtttcccagtcggtctcaggaccatgcgtcgccacggtcacgttcgctggtgccagtgaactactaaacttcgtaaaaatacttggaaccttcggcagcgtaatgtggatctccgccgaatggtcgcggtagttcatccccaccgcaaaaatctgtcgcggggccgtgattggtgccgctaattcttgcggcgcaaacgtttcaagcgagccaagttgccggtccgctgctggcatatgtagcgcttccaaaactgtcttcgcatttaaaactgtttgtccatgctgttcatccgtaatgataaacggtcggttggcccgcatgccaatttccatattaatcacctcattaatattattgtacactcatctcatgaatcataacaataatgatagttgcgtgacggtcattccggacaatcttcatgaacgttcaaacgcaattacgaacttagttcaggatacttcttcatgtaacgctcatcactaaaaaaggtacccgcctaatttgcgagtacctttaaccattacggcttccattaatgtgggccgtcatcctttggttctggatgtttcttttctggtgctttttcttgcttgtcattttgttgccgccactcttctgtcgttaacatgtctttaacgactaattttaacttagtcacttgataaccagtcattgatttaacggccttggcaaccttatccgccacccgtgctagaatctcctgaccattcttaccataagctagaatggccgtcaattcgattccaaccgtctggtcatcgtcatcggtatccactgaaacaccggtctgcgggcgatccttatccgtaaagcgattggaaatatcatcaatcagatttccctgtaagctcaatactccttcaacttcttgggccgtgttactagcaatctttgccaataccgtatcgtcaaaaacaacttctggttttaaagatgtcgctgttgcttccatcaaaattcctccttgttttgtcaaaaatcgtcttaccaatgactactctaaacgaccgtgctattcaacttgccgcttatctgttgattgatccgtatttggtttgccagtggcctgatcttgccaatcacgcttgctcatgacgtcactgacatgtaccttaatttcaatgaccttcaagccagtataccgttcaacatcttgctgaacacgttgacaaatttgattgaagatttgtcgcatgtccttaccatattcaacgatcatcgtcatatctaaagcaacttgtttcttaccaacttgggcgtcaaccccctgcgtcgggtcagcttcatcacgaaagcggttcgttaaattgcttaacatgccgccttctagggataacacgccgtcaacattgcgtgaagctagaccggcgattttttcaatcacaccgtcatcaaacgtcaattgagtctgtaattgttgttctggttgtgccattgtaattcctcccattatttagataaatactcactcaacttctgactaactgcagccaaatcgacgtggacaaaccgtccaatcgcccagccgatcagccctaaaactgcgactaataagactgccgaaaaactggttaatacccagacgatacctaaaagcagtccaatcagaaaaccatactgtgcgttactcatcaggaccctcctttacaccacggttaacttacgctggtgatttgctggcttaacttgcactactggttgttcgaccgtcaatcccaattgattcttcaaatagtcctgtgccaaggttgccgcctgttgggccgtggtttctaacgatgcgtcagtattaaccatcgcatcaatttttactcgtacccggcgacgacgccgtaatttcaagtgaacctcaggatcaatcagattcaactgattaacgagtcggtactgcaaatcacgttccaaagcccgttgcggaatcgttaactggccaaccttgccatcatacgtcaacgtgctgactttaactggtcgaaacaagccaacaattatcaataagataccaacgattccggcaataatggcaaagaccatcaataagatactccaaaccattgggtagttaatcgtcagatcagctaaccaggacgtcaaccacgggatcgggtacaactgacccagttcaaaaaccgctaataacaccaatacaattccgactaacgtcaccgtaaacttagctaagcggctcatctaatcaccgcctaacgtttcttacgcatgccgaagattgcagaaacgattaatactaagataatagcgcctaagattgagggtaccaatgccataccagctaacgaaggtccccaagttccaagcaatgcttgaccaatccaggcaccaactaaaccggcaataatattgccaatgatccccattggaacgtcacggctggtaatcgcacctgctaacgcaccaatgacaccaccaacaattaatgaccatagccatcctaacattctaatcactccttacagttatatttgagtacatgcttatgataaccataatttaattttgggacaattaatatgcacactggtcgaattgtcacttaaaatctgaacaattaccatcaacgaatcccgccgcttcgcaatttaaccacaaacataaaaaaatcagcctgccaattgttacatcgcaagctgattatttctattaaattgactactaataactgctctgacttagctagattaggctggtttagccggagtctgtttggctgccgtcaatgcttgattgattaccttggcgtataaaatatcaccagcccgaatgccaccgaagtgtacgccatccgtccctttgaaaacttctggatgttgcgccgcaatcttgccccagtcggcaaccgtaatgaacttatacttagctggcagacgccgttccaaaacggccaactttgatgaattccagtcagcatcggcccgggcattataaggtgtcatcagaatcaacttgtgccccggctccaagtcatgaatgatcttcatggtttgttcttcgtaatcatccagcgcgttggtcccaatacaaatcaccacgtactgccgtaacgtatggcttcgctgctggttcatcatgactttatatgccaggttcatcgtccgatcgccctccgcatcaatattgctgttcgcgacgtgatcgcccaggtagctccgcgtccccagcgtgacactgtcaccaataatggaaacacctggtgctttttcttggtcacctttaggcgttgcctgcttcttcttgggcgttacggccgcgagcacagcttcatgagtcgttccgattttatcaatatcttggtaaatcccgctcacccataaattctgttccagtgtcgaaagttgcggtgcatttttgactacgaccccggtattaactgccaacaatactcctgcggtgataacgggtaactgcaactgtcgccacgtcactgtatgaccgaaaacgtgggcgcgtttgcccgcaattactggttctaacacgtagtatgacagcgcggataagataatcgacagtaccgtcgtgagcagtgccgccaaccagttgaccatcatgtgtgaaaaaatcacgtacaacggccagtgatagagatacacgctatagctcacatccgctaagaacgtcatccaccgcggttccttgaggttcggcgtgtggtcatgcaacaaccgggcgccatagatcatgatgccagcgagtacagtagccagtaacagcccatcctgatacgtttgtagcgcatcgaacttcatccggtcgcctaaagcaactaacaagataaaactaataagcatcaccgcgcccgcaatgatcggattgcagtgcgccgtggtccaacgatagattggcccttgagccttgatgccgctcaggacaccgataagcccgccgacaaagaacggaaaacagtgggtcagacttgaaaagtagactggtgaaaagtcctttaagccgaccgcaccaaagtacatcatgacaaagctttcaatcgcaaaggcagtggtcaacagccctaagccccagcgaaaacgggtcaatgcgcgccgaccactcgccaaccgccgactgattttagcgaccaaccacgcaatcaggccccataaaatataaaagtgcatttcaaccgctaatgaccacgtatggacaaataagtgcggaataaacttgttttcataactgccacccgtcgcaatttcaaaataattagtcgtaaatccgagagccgccgcgacctgcttaccaatgtcggtcacaaaatcgtggtcaatcaagtaagttagcggtagcaccaataacaccgcaataaataatggtggcacaattcgataaaaccggcgaccatagaaagccattagtttaaagttatccgaacgagcaaactcgtccaccattaatgacgtaatcaaaaaccctgagaaggtaaagaagatgtccaccccgataaagccaccagtaaactgggtttggaaaaagtgatacgtcaataccagcacgagtcccgttatccgtactaaactaaaccatttaatccgcattttctaacttaccgtcccccgtaatttttttggcataagtcttgttgccgacccgcagtttgaccacaccattcaacgcacccttgctgaagttgccttgcaaacgccacccgttcggtgcaatgaattcgcctgggccttcaaaccggccattggtaaaattacccacgtagcgcccctgtttgttaacctgcaacgtaccctgaccgtcaaacttgtgcttcaaaacggctccgctgtagctcatccgtccgtgatccaattgcacactttgctgcttcgccgttgatggtgctagactgataacggcaaaagtgacaataccgataatcgtgataatttcaaagaccattctgctactgatttttcccatacctctattcctttcacaaccttaattccccttaaagcaatcggcagttagccaccctggatttcccaatcatccacgggattatacggacacattatgtaccatggctgtcaattgcaactctgcatttaataacggatcatttttcattccgttaattatccattaatttaattcgtttatttaaataatcaaaaaaacttcaatggccgtattacttaatatattactaaatattagccttgccgtgtacaaaatatcaaaaatgagttgtcttttattgttaataccggttatgtttaattcactaaacttaatatctaaccactaaaaaaacagtcaggccaaggatttcggctgattgacaaccataggtaagcattcattgcctatctatcattcccggtatccatcggctatcctaatccaactgtttttattatttcatatgatcaataattctaaaaagctttgagctcagaaattaagcgcgtttgcgtaactttgttaaacccaataatgagaaccctgccgctagtaatcccaccacagtcaaactcgctgactgtttttcatccgtttgtggtaacgccgtggcctttgcggcagctggctgttgtttggcgcccgcaaccagcttcattgttgcattgccatctgaaacatctgcgctagtactcgtggcattagcggtatctttgctattcgctacggtttcagtcgcggttgcatgtggtgcagtaacaccagccgattgagcaacacttgtggtttcaacaattccatcagccacagccgtcgtcgttgtaaatttgttagcttcgacgcgtgccaagaaggctttagcagccgttaaatctccttgtgcgacggcgaaatcaactctggcagcgccaagcacttgtttaagttgtgctaaatcggcctttttacgatctagctgcgctttcccggcagcaagccgatcgtttgctgtatcgacttgagcctgcccctgcgcgagcatggccttggcaacagcgatttgttgttcagccgtagcaatttgggccttcatgcttgcaatccgcgcgggcagggccgcgatttcggccgccaatcgggcgttttcagcggtcaaatcggctaccaatgtcttggcactggctaagtttttagcggcttgcgtggtagttacttgcgccgcagccgtcttcgcgattgctgtcttcaaattacgaacgggcgatagttgttgctgttgcgccattgctaattgcccttgagcttgcgtcaaagcaacattagccgctgtcaaactagttgcagcgacttgaacttgggcctgtttagtcgtaacagtcgcttgtaagccacttgtctggttttgtaaagcttgtaaactggcattttggttagccagcgtggttgctaatgtcttcccggtattttgtaaaccattcaaactagccgttgcagcaatcaacgttgcgttagccgccgcaatcttcttcggatcagcgggggccgtctggacgtaattgaacgtgacagctggtaaggccttagtcccagtagcggcattcgcatgggcattgtcgaacaaatcaacatacttgtcttgctgtgcttccgtcatcccggcattatcgacttcaaatgccgccacgtgtttggccaagttgatggctactccggcatcaccagtcgagtatattaggttgacgcggtgaccaaaggaaccggactcaatgttattggattcatcataccaacccatcacagcattataggccgtttcttgatcgctcatgaaccattgcggataaacttgtgttaaattttctgcataacttgagctagtatgatccaagccaccgtcgtcttgggcagctgctcgcgcaatcgcattattttgcaacgtcgccgtctgtttcaatgctggttgaccattcagcgcccgtagctgattgatatattcaaacatatactgattgattttatccgcattaggcacatacttgccattacttggataggcgacgctgactgtttcggccccagtcaattgagattgtgggaattcggcagcgtcatacttattttgcgattccgtcgtggtcgttggccgttctgctgccgctaaagctgcttgagctgcggtcactttggcttgcgctgtggaaacagcttgattattcgcattaatttgactggtcgtattttgaatcgctgtcttggcagaattgattgcctgggtatttttattaaccgcatcttgcgctgatgctacggccactttagcttgatttgcttgggtggccgctttttgctgggcggcagatgcttggtcaaccgtcgcctgtttagcggcagtgacggcactggctgcatcggcatcagattgggccgtggcctgttcagttttagcttgcgtcaaggccgtgtcagccgcgtccttagccgtttgtgctttcttctcggtagctggctggttggcgatagcgactttgttggccgcaatttgctgttgatcagctggaatttgcgtttcagctgctgccgtttgcgacttagcagcgtcgactttattctcagcctcagcgaggacctgattgttagcatccagtttttgttgtgcacggtcaactcgggctttacccgcatcatactgggactgtccaatcgcaactaattgactttgattagtcacttgcccctgcgcagtcgccactttagcttgtgttgtattgacttggttttgagccgtgactacgttccccttggcagtctgcacgttggcttgatactgttgctgactagtcggtttgaccgttgctaacttttcgttagttgccgtctgagtgctcccctgcgtggcactcgtctgattcgtcgtatcgctgttatcagttgccgtgtcggcctgcgcattgttaacacccaattgggtccccacgaataatgccgcagtggtaatactggtatacaataatttcttattcataaactcactccaataagctaatataaatatcattataaaccaatgatgccataatgctagatggtgtttacacccttatgtcctgattgaacattggaaagccttatttaatcaggactattatgaattttagtcgttgaagaagtcgcaaatcaggaagtaccattgttccaattttacagtataaagttattttgataatcaacaattgctaatcaaacattacctagttatcattaatagccactgttttcaaaaacaaacgaaactagggtggtatatttctatccgattaacgacagtcgctggtatacttttattcacttgtttctctattgtaaggcccttaaactcctagttgtacctaattcaaaaggagtgagtcctattttcaatcaaatcactatccataaccaacatactgaaaattggcttattattggccttttctgtggggcttttgtgactggtgctgacgcatttattatttcagcactactccccgctatcgctactagtctgcatgtgccgactaacaccgcggcatacggagtcaccgtttacgcactatgttatgccatcggtgcacctttattcggcccattaggtgaccgctttaataaacgttttttgctaatcagtggctgtggcatcttcttactaggaacactactctgtggattagcaaactcattgctaacattctatctttaccgtgccatcgctggcatcggtgcagctttatttgtcccaaacatttgggcttttatcggtacttacttcaatggtcaacgacttaaccaagtcatgggcatcgttatgtcgtcactttcattatcaattgctaccggtgtaccactcggtgctttactagcacaactcagtagttggcatatggccttctggggttcagccatgctaaccttgattgcatcatcgattttgaccattgccataccttcattaccgagtcagaatgcccagcctgacggttattttacaagttttaagacattagtccacactcctcacgccatcgctgccctactgattacattaacttggatgactgggttctatagcgtttataccttcttaggtgtttttgcaactgcgacctttcatttcaacacaatacaaactggtctcatctttatcacttatggaagtgctaattttgttgcgagtttctttgccggtaaacttatatcattgcttggtaaaaaacagagcgttacaattaatggcttagtttcagctacattagtcttatccttaggcatctggggacaacatttagcagtattgctgattattctgattgtgctcgccttatctcaaggctggggtgtcactgcattaactgcaacaatcgttaatattgtgccatctaatcgttcaaccatcatgtcatttaatagtgcttttttatactatggcttaacgttaggatctgccgctggtggcctgcttttaactaaaattggcttttacgcagtgacgattgcagcggccatggccttattaggcgcagtattgattacaaatgcacttagccactattcggattagctttgagacaatcagcttttaatgcgtattaaaaaactgctccgagtcaagtagacagttcaaataattaaaatagctatgcagtttttagaatggcatgattccgaaattctttcggggtcatgccatttagtgtttcttggcga

SEQ ID NO: 20 - DNA, 27803 bp, synthetic construct
  source 1..27803: mol_type = other DNA; note = Lactobacillus plantarum PDA6 - Contig 20
gagatgtcgctactataatggtgtgcaaagcttttcatggattaaaaactcctgtttttgatctaatttaactaaaatcaaatcgaatgtcaaagtatccaaacacgttcttagaatcccgaagaagctgacaaagacgaagttaagaatcccacaaaggatgatcaaccagcccattaaaacgtgattgcggttaatcatgacacttaaaataatcgcgaggacagagacaataatgcagccaacgccaagattgctgaccccagccgatccgctggtttctaaagcactaccgatgccgccgatggtcatcgccagtaagccggcaatgataccgaagataccgccaataattcctaaaactaattcggctgttcgcgaatggggtgcgactggtgtgacttcgttattctgatattttgacattgtaattcctccaaaagtatggttatgataaaagttagtaattttgataaaaaggggggtgtcacggtgttaccgattgttcaagcaatgcaattgttaagtacggctggttatgaaccactaggaccattagttgcgcaacgcgagtttccgttactggttaagaagcaacaggttgtttcggtagctaaactagtaaatcctgataatattcctgttctacagcgtttgaagcagcagccaattccccgaatgccccggatcgaagcattattaacggcggctgattgcattgtaagtgttgagaccttaattaatggtcaaacactagcggatcgattggcaacacaaggaccgttttcccccgaaatgacggtgcgcgtcgcacaagaattgttgataacgctacaggcgttggggcaacaacaaattgtgcatcgggaccttaaactaagtaacgtgatgtgttatcgggatcactactatttgattgacgtcaacgcagcgcgacaatatcatgctgagcaagacagtgatactcgtttattaggcacgatcggttttgccgcacctgaaaaactatggcttcgcccaaacggatcaacggagcgatctatattcgttaggggtcgttctaaactgtttgttgactggtcaagagccgagcgggccgttagatacaacgacactgacacaggattcaacatgggccccgattattatgaaggccacggccctagacccacagcaacgatatcaaagtgcgactgcaatgttagcagcgttacctggtcatgagcattatcggccgcaccgtcaatcaatgattaagcgaatacaggcccggcaatggtggccgaaagtcaaacgacctttacaaatcagtttgtggggcctctacatcttgctcgtagttgcgaccattggtgctggctttgataacacgacttggcccgcccgcgtcgatttttggaccgagggttttatgattatcggggcgccactgattgcgcactatgccaatcagtggttaaaacaccattggtcggtattacgttggcaccgatatcggtggtggttacgagtagcagaagccatcttcatatttttgatgttaggccgtaacggctagtgtacgtaggctggttaaccaattactagtacgataaatagcataaccgtttagttatcaaaaggcttatgcaaaatgcataattttctgactgcgttggcgcgacgactgaattcgactgggtaagactttactcagtcgaattttgatttagaggtcaggaaagtggttgaaaataatcctgaaaactgttgatgtgttttcaggattatttgaggagacgattgtatttatggtacaatgctagtcgttgacgtttgataatataaatatatctaattaaatataagaaaggaatattttgtcgaaatggatttaaagcaaagcgatggttggcgatacttagctgggtggagcttcattctattaatggtggcgagtgccacattgcaacatgatgcggaaatcattttacccgaaatcggtgctctgacagccgggacgtgggtttatcgtaagacggcgtggactcggcaacccttaaagttattcttagtaccatctggaactgcaattattggcttcttagtcaatcaactaccttggtcgtacgccctcaaagtgcttgtcggtctattactgatgctattattattgaaggggttaaaatcgaatttggcgccagcctttgctactggcttactgccaattatcattaatgcaacgcactggacctttatcgtagccatctttttctggactatttgcctgatgattggggcttggattcaacgaccgcgatcaatctcacgggtaaccgaagcttctgctagtcgctggcaaatgctcggctttatcagcctagtttttgtctgggtgggtattgtttggctagcgggacagtcccagatggccgcaatcccacccgtgatcgtcgttttctttgaagcggctcaacagtctgaatatacggtaacgaccgcacttaagcagtggcttgcattgtcggctgctgctagtattggggtcggcattcacctattgattgcttcgtggctattaacgacggtcattgccttaccacttgtgtatttgtggttacgggcgcttaacttacaattgccagcagcgtatgcctttccactattagccttagtgttaccagccaatatgtttaacaaactaccgacatccgccggtttagcggccgctttcttcctaggatcgttactcatctaccatcagatcttgggttgggtacgcatggcggtgactgaaagctagttgtcagtcattcctgaaaaatggtcaaaaaaataccaactatttcgaaataatcgagatagttggtattttggcatttaattaagctttattgattcggttatccgcatacatgtatttccgggtcattggtaaggttcgtgatgaagcacctttagttacgaggtactgcatgacgtcaatgttaccagactggaaggaagcggcacaggcttgtaggtagagatcccacatgcgagtgaagcgcacgcccatcttttcttcgatggcagcgcgcttagcgttaaagtttttatcccagatttcagtcgtccgttggtaatggcgacggagggtttcaacgtcagcgacttgtaagccggcgtcaacaatgtgttgtaagttttcggtcatcccaggaacgtagccacctgggaaaatgtacttatctaaccaaccgttagtggcgccaccttgttgccgggtgatgccgtgcaataaggcaacgccgtcagctttaagatagtggttaacgcgttcaaagtacattgctaagttgtccttaccgacgtgttcgaacatcccaacactggtaatgtagtcgaaagtttcgtcgccaagttcacggtaatcttgtaaccggacttcagcaacatcactgaggccttcatccttgatgcgttgagcaactaggttatattgttcttgtgataacgtgaccccgacgacttttaagccgtattctttagcggcagtcaacatcaacgtaccccaaccgcaaccaatgtctagtaaggtcttgccaggttgtgggttgagcttttgaatgatgtgatgaaccttatgaatctgggcttcttctaatgtatcagtgtcatgtttgaagtaagcacaagaataggtcatggttggatcaagccacatcttgtagaagtcgttacccacatcgtaatggctttggatgtcttgttgactcttcttttcagagtgagattgtttaggcatgaacttcttgaacttagaattgttgaagaaactttctgccgattcgtaggccgattcaattaatttttgaatactgccatcaatttcaattttgccatccatataagcttcaccaagggcaattgaagcgttcttggtgatttcacgcattggaatggcttctttaaaagtcaccgtgacttctggtgtgccttcaccataagtttcactacttccatcccagtagttgactgtgacgggcatattgaatgagtggcttagaagggtgtggtaaaaggttttttctagcattgcaataaggatcctttcttcgtaaaatacactaattattatacgcttatgaaaacagttttgtaagcacaacgaatcgcgacctgattcgtaaacatgttataataaattaattacaaaatcagttgatgggggtgtcgtgatgaaaagatggatgtggatcgtgtttgcagtaattatcgctgtgggggttggtagttattcatatacgcggtaccgtctgcaggaagactcatacacggctgaaatgcgaactggtgagcgggcactgcaagcgcggaattatacgttagcggagacgagttttacacatgcgaccagaacgaaagctagtaatactgaggcgcaacggtatttaacccagacccagacttatgtggctggtcaagaagcattggctgcgcggaaatttgacatggctaaacgtgactttatgacggttaagacgaccaagcacggtgcagttacgttaattaatcaggcccaagaacaacttgccttaataaaaaaagtgcaacaaaaacgcaagacttatcaacaacagtatcagaaagctgctgagctgaataaagcgaatgagtttacggattctaacgttgtaattgctaagttattgcaggataaggcgtttaagcaacgttactatcaggatattcggaaaaatgtgttggatttacagaaacaaaataatgcgtcactcaagacattgaccggttcagcgccggtgatcccgagtgcggcacaagcggttacggggatgaccggaagtcagcaacaaacgcaacgcacgccaaccactaaacagcaggcggctgcttcatcatcaacttcctcagctaaccattcgatgggctcgtcagctgcagctaacaacagttatggtgacagtcaagtgcagacgactcgtgctgagttgaccgcgcaagggctcgacggcagtagttatagtgatgcccaaattcgtgctattctgcaacgagcagcggcgcaacacctctcactggcgcaagctgcccaaacgatgaattatagctctgatcagattcaggcaacgcgtgcggagctagcgcaagctggatttaatgctagccagtatacggatgcccaaatcgaggccattttacaacaagccagtttacaacatatgtctctggcgcaagcagcgaggtcgttgcagtaatataaacaatttaataacagtatggaagtccacttaacaatcatcgataaaacacctacttttaggtgtcaatcggtgatttttttataaaaactgttatagaatgtaggagtaaggacggaaagttttcgttcttgatattttggttctacgggggcggtcattttatatcggtattgacctttttttaacgttcatatgtcaaaatgggtataaaattgactattttgtgtactatttttgtttgatgctatagaatattaacagattagggggttaaggtgcccgttgatgattgaattaatggcagaccaaattaacatgattgggtaaagtagttcgattgtcaatggtgggcatcgaaattcagtatgattattaataaacatgtaatgcgcagtacgaatgaaaagcaagttctgcagcaggttattaacgaaggaccgattagccggagccagatttcacggaacttgagtttgaataaagtgacggtttcagatatttataatcagctactgcggacccagttcatcaaggaaattggctgtggtgtcagcacgaaaaacggcggtcgtaaaccagtgatggctgagctgaacgtgaactatggttttgtggccagcattgacatgacagctgacgcagtcaaacttatgtattcacggttgaatggtaaaattttgcactttcaaagctttaagacgagcgatatgacgttgacggatgtcattgatttgattgaagatcaattacggaacgttgatgactatggtacgattcatggtctgatgggggtcgccattgcgctggatgggattatttatgagaataaaatcctcaagacaccgatcaagggactaacacactttgatctagcaaagtatttacgtgataagctacggattccggttgttctggaaaagaaagctaacttaacggccgtttttgaacgtgatttccatgacaacgagattttcgataacgtggtttcggtagtcgttcgcgatcagattcatgcgggcatcgtggctgattcgcgactatattctggtcatgaaggcgaagcaggtgaagtggggactgctttgttagaagatcggcacgttgaggaccacttggcatcagttaacgattatgcttctgaaaaagccttgtgggctcggttgaaggccatcaagcatgttgaacgattagatttaacgacggtcaagcatgactacatcaatcatgatccggaagtgacaaaggtcttcgatgactttgtttactatctatctaaagtgattgcgaatgtttccacggcgttcgcgccggatgtggttgtgttgaacacgaccgttctagaaatcttgccacaactattgactaatgttcgggagagcacggccaagctaacttcgccaagccggcaagttccaatcattgcaaccaagaacgtacaatcggcggccttgttgggtggcgcctcagttattattcaccaagcactaggattagagagcttaaagatgcagttctcataagttattaagtgtttatttaaacgaacgtgtgaagtttatcgtgcgattagtgataaacttgacacgttttttgttgattcacaacggccttttaatttttattgctgagactttccgttagaataggagtaagggatagtagaggggtggattttgtggaattttggtcacagttaatacgaaatgtgcgctggcggcgcgcctgcgtattggcgttgattgtgttaacgctatacttggcatcaagtatgatgagtattattttattaacgtttatttttacgttcttagtgacgcggttagttcgggcagttcggcggtgggtgaagattccaccgacgatcattgtcctagtggtctacgcactagtcattcttggaatttactttgctgtatcgatttatttaccgcagttgatcaaacaaacttttttgacgtttgaatcagtctatcggttttatcagaacccatcacatgatactaaccaagtgttgacgtgggtgacatcgtattttcaagaatcggatatactcaaacaattgaagggcggcatttcagttgtgttccagtatattactaatattggtaatatgggactaaccttcttcttatcatttattttaagtttcttctttacgattgaggatcatcagatgcgggtcttcacgaagcgctttttgactagtacgtttggctggttctttcaagacgtccatttctttgccaaaaagtttgtgaatagctttggcgttgttttggaagcacagtttttgattgcgattgtcaatacggtgattacggtgaccttcatggcaatcttgaagatgcctcaactgattagcttgggattaatgatctttattttaagtctgattccagtcgctggggtgatcatttcagtcgtaccgctgagcttgattgcctattcggttggtgggttgcgctacgtggtctatatgctcttaatgattttggttgtgcacgccctagaagcctatgtcttgaatcccaagtttatgtcgagtcgcacggagctgcccattttttatacgtttgtcgtattgctagtgagtgagcgtctgtttggtgtctggggattgatcgtcggtgtaccgatttttaactttattttggacatcatcggcgtgaaaccggttcaccggccgcgacctaacattaatctgaaaaaaacgattactttccacccggattctgaaaataagcgctgatattgttttgatttttcgctttttcagtgtaaaatagggtgagtaaataacttaagaaagaggtcattaactgctatggcaaaattagtattgattcgtcacggtcaaagtgaatggaacttatctaaccaatttactggttgggttgacgttgatttaagcgaaaagggtgttgaagaagctaaggctgctggtcaaaaagttaaagaagcaggcttagaattcgattacgcctttacttcagttttgactcgtgccatcaagactttgcactatgtgcttgaagaatccgaccaactctggattccagaaaccaagacttggcgtttaaacgaacgtcattatggtgcattacaaggattgaacaagaaggaaaccgctgaaaaatacggtgacgaccaagttcatatctggcgtcgttcttatgatgttttacctccattattgagtgccgatgatgaaggttcagccgttaacgatcgtcgttacgctgacttagaccctaacatcgtccctggtggcgaaaacttgaaggttaccttggaacgcgttatgcctttctgggaagaccaaatcgcacctaagttgttagatggtaagaatgtgatcattgctgcccacggtaactcattacgtgccttaagcaagtacatcgaacaaatcagtgatgatgatatcatggaccttgaaatggctactggtgaaccagttgtctatgactttgatgaaaagttaaaggttcttggtaaggaaaagttaggcaaataatttaatagttatttactagttttttggagcactccgctgtctcaggggagtgcttttttgggcgctgaggtctgataacgtgggatagggttggcatttagtggcaaatggacgctaaatggacactatctagaaaatagaaattaaaaagcagaaaataatttactgccttgagtaatttaaaagggatcccccaattcccccttagctcccataagagaggccaattgacattttgttaattggatcaatggctggaactttatatcagacatgaatagtattcagataaataatgcataaggatcaggtgtaaaaaatgagtgaagcaactaatgaagtaacgcaacgcgagatggtgcggattattaaccagtttcgcaaacaaggttttaagggcacttacgttagttttcagcacgtagtagacgaaggagcatcatattttgtagtgatgagtgatgaaaataatagtaatcaaggtctgtttaaaattgatttattaagtggtgatattgtctttcaatatatgttggatgagaatcacgctgttagtaatgattagtattagtattaacgcccatcatcttagttaaatggctagatgatgggcgttgttttttgagttaatcggctcttttaatacgttatattgaacaattttctaataattataattacatcataggagactaaacatcttatcgggttagggtgattaattgggcaaaaaattcgagttgaatttgtgatctaccatcaaaacttatttcattttaagaatgtgattgttgtttcaaatgcgaaatttcctttagacccgcattcatcaacacaaataccacgatccaagctagcccaatcaataaaattaacttgagataattactgcccaatatggtaatgttccagtcccacgcagcgtgcatcaatactgctaagacgaaaaatacaagaaagcgtgtatctaacaactgactaaacttaaacggatggtcacgtttcacaatcataattgctccgccagtgatggctgcccataccaaatgaccaccaatggccgaccagccacgcaagattgccactgcaactagttgagcatttgccctataaatgtatccagccgtttcaaatgcagcaaagccagaaccaactgccgcgccaatcagaatgccatctaacacatggtgcacatctaattgactgataaaataagatataattaagactttcccaagctcttcaactattccaattgataaagaatccttgagtgtcaaaaccccaaaaatctgactagtcgagctaaaagtgacaaattggtataaaaacaatgtaacgaccattgaaaaaattccgccaataaagaacaccttaaccacttcaaaaagactaatatctttaaaagcattagattcaaagaaaaatactagacctgaaaatgggactgcaaaggctcccaccaggatcaatccgggaatcgcattgctgttactgaaaccatctaccatatatagcaacaccacaaatgcgagtaaaaatcctaacagaattcgcgaaaataaccatggctttgcccattcatctgaaacatccgacaaagcaggtgtagtcgtcttagtccctgcaataaaaatagaattggcctcatctttagtgtggtgtttgaagacttctgagaataaagctacaatgttaaccttaacggcgccctcttcacctgtataatgattcaacttagccgttgcattattgtaaatttctttaaattgattgttactatctgatactgattgtgcatggctagtttcaaccagagcattaccgcaacttggacaaaaattagctttctcccgcaccgaattgccacaatgtggacaatatttcataacgtttccctcactactccaatgtagattgataaaatagcaagcctaactaattcatggtgccaatttaatcagtttaatcaccatttttagaaaggtccacagctaaaaaacgcaacacgatatttgtggatgatttctgcatcattttgaacaccgtagttcgtatacttaccaattttattatacactgttgcagcgccactagataggcgttgaaataagttagttcggattaagtttacaatctatcgagtaattaattggttatttggtagattgtaaatttaatttggacaagattacaaatttaatccgaattagcccggaacctttcaatggtcatctgtggatgatgtacttttaacggtcgtcgattaattagttaaggtgctgctaaggtatcatcagtttttacctgatttggggaagcaccaacgtgaccgatgatcaacagttatgggttgtgtttcaatggaagtgattaagctaattataaattaaagcggttcttaagttaaaggtggtcgaaatggctgctggtgaacaggttaatcgtaagtgataggcaattaaagtcgtcaatgttgccgtaagaatcgaatgatgaccacaccctgtcttttgcaatctgagtcttgtttagctaattcagggctagggggagtttgagcagcggctaaggtagcagccattggttggaaagtattgtgacctttactgataaattgcgctagtgtcctatgctggaaacatgatacaatacaagtgtttaaagtaatcgttcattaaatattaattgctacaattgtaagaaattattgtgaattttttagtttctattcagattaattatagaaattaccaattataaattaatagtatttggaggaaagtatagatgtcatcatttgttgaaattccgagtccgtctgtatttaaaatagaaaatttatttcgagataataattttatcgtaccgctctatcaacgtaattatgcatggggaaaagatgaagtgagtgatttctggaatgacttacaagctatcattgatggcaaacataatagtcacttttttggacaagttgttacttttaaaaatgagcaaggaaagcaagaagttattgatgggcaacaaaggttaaccaccagtttgatctttatggcagctattcgggatatttctattaaacttggtgacaagatcaagagttttccaagtgatattaatatggaagatgaaattggcgatacacttcgtataattcgaaggcaagttagtaaatctattcgaggtactaaaggcgaacagccttcactggtagttcaacaaaatgttggagatcaaaatagtagtgaaacattagacaatttctttaagcggttaacgaatactcgtcttgctgaaaatgattataaaaccatttcagaacccaaaaaaaacatgcttaatgcatatgttgatataaccagatccatcaataccaacatagaacatggaaaagagttgggtacacgaattgatcagctgcagatcatttttgattcttttatggaacatttttacattgtaatgatttctgcaccgagtcgacaagatgcattcactatttttgagactctaaatagtcgtggaaaagatttaaaagcatcagatattataaaaaatcatgtgatgtccttgatgaataaggatgacctaaggaatgctaatcaaatttggaatcaaattactaggccattagataataatagtgaccgtattacgcgctttattagaacctattgggcatcacgctaccgtgttgtttcggaagcaagattgtatcgtgaaatcagtgataagatatcaacagttactgaagctcgaaaatttttaactgatttatcgagtttagttgacatatatacagtactagaatcaccaataagtccaaaagctcattataattattttgaaaataagcgtttagaccaacagttagatatcctaaataggatgcatattctcctttattatccagtagtcttagcattaaaatatcgaagattcagtgaatcggatatgttgaccgttgttagaaaaataatttctatttttgtcagatttcggatcattatgaatcagggaaccaacaagcttgaatcaggattttcggatgttgcgcatcagatttggtcgctaaatctatcaaatagtaatgctattataaattatatggatgaccatctattgcctagtgatgatcaaactaaggctagctttgaggtgatgtctaaagaaggtgggaagcgtggttctaagaaatggacgcttgtatatcttttagcagagctatacgaggcaatctacgacgattttgataatgatacgctttatcagcaagtttttagtgatgacaaatatagtttaattcaaatctcaagtgacaacgagataaaagattacgctacctatttcggtaactggactatgttggaaaaagaattaacaaaaaatagttttagttcgatggataaactcatttctgcactaactaaatctaagttgaatagtaatcataagttagcaacgcaactgcaagaaaatggatggaacgttgaaaaaattaagcaacgtcaattttcatttgtatccactgcagttcttatttggtaagaggcagattgtagatttaatgcgaacatagttttgacaacgtagagcttggatgtaatcaaatttcgttaaacggaagacgaaattgtgcctaaattattagatggcaagaacgttattatcgctgcccacggtaactcactccgggccctttcgaagtacatcgaacgcatctctgatgatgacatcatggacttagaaatggctactggtgaaccagttgtttatgacttcgacgaaaaattgaacgttttaggcaaagaaaagttaggcaaataattaatagttatttactgatttttagagcactccgctgctttcaggggagtgcttttttgggcgctaagtgccgataacgtctgatgaggttggtaattagtggcaaaatggacgctacttgcaatcatgaaaactaagccttgggtttcatgattgctttcaaagggagactttacgatgtatgatgaagctgaattagttgaagccaaacgccagattgattccatcgtgcacaaaattcaggaagctattaagactttggaagctaaggaacagcctgattgttataagtcccagttgaccctagctaagcggcgtttgaaggcgtttgggattgccatgcagttaattgatgatgaattggcccgatttaaatagaccaattcgaatattttaatgaattaaattataatcaaacttggtgaagaatcacttgaaggctttgggattcttgactagagtgttgatgataagttaaattaatgaattaggggtagtggtcgctaacttggtcactacctagtgagacagtggttaagaagtaggagctaagcgggtaagttcaaatcatacccccctagcccccaatccccccggtgaaccgtggagattaagattggggatttaaaaggggacaaagctggatgaatatcaaaaggtacggggttgatgcgccgtttgcgctgttgatctacaccgtgtttggtgtggggttactgtggcacgcgtacgtgaatcgtttgaagtaccccatcggcattgaaatgacgatgggcatcatattattgctgggtgccctgatctttttgcacactacggctcaggggaagtaccggttatttgacgaggctatgcaccacttaaatctaaagccggacagtcaggtcctagatttaggctgtggccgcggggcgttattaactcggattgccagacaattaggcccgaatggcaaagtaaccggtttggacttgtggttgtcgtgggaccaatcacataataaaatggccgtggcacaaaaaaacgtggatgatttgggcctaaccgaccgggttaacttggtaactggggacatgaccaagttagacttcccagacgaaagtttcgacgtcgtgacgtcaagtttcgccattcataacatcaaaaatgaacaggctcgaatcaatgcggtcaaggaagccattcgggttttgaaacctggtggtcatctgatgatcattgacactggccgcaatatcaatgaatacggtcaggtctttcaagaggctgggttacaaattacccaatcgatgggcttaggctttaacggttggtgggccacgccattaactgatagttacgtggtggctggtaataaaccagttactaaaacggcaaaataagattaaagaagagaattggagttacaattaatgagtgaaaaaacagcagcgaacgaagttacacaacgtgaaatgattcggattattggtttgttccggaagcaagggttcaagggaaattaccttagttttcaacacgtcgttgatgaaggtgctacgtacttcgtggtcatgggcgatgaaaataacggcaaccaagggctgtttaaagctaacttgttgacgggtgaagttgcgtttcagtatatgctggatgaagaccatgtggtttcaaaataaaagtttaattatcagaaagtgtggcacaatgacttgattgtgctacactttctgataatttaagttattaattaattgagcaagatgaaatgagtggttattttggatggagaattaaattgttttacattggtgaacgtggcagtaaactcaaagttggagaacattagttttttaaatctgagtcaaccggtcaccagaaggacaagaattaagaattcattggactatttatgggtttcaaaagagtttagaagttcttggggaaatatttatccgggagaacagcttgatgtgaagaaggcaggttcgacggttcttccctccaaagaagtatttgtggcgttatggataacttaaggttatacggttctttaagcagttttaaaagagcaagtggcatctcagaattaaaaaagaatgtgaaccgatttcaaacttataatgaggataagatatcgaatctagtccgtaatggaaataatactttgggggctggaatagaaaaaactttcccagatttaatctggtacgataatcagcaaaacaatggaggaaagtttgcgtctgttaaagaatcgacaatcgaagaaaagtttaggggtgatgttttccgagtaggaaatgagttaattgaggaacttgctggttggtgtaaaaagagtgaggtttctggattagggcaaggaacactatttatgaaatacaattataaggatattaaccatattaaaatgcaaactttggcagttaattcggtcaacatggcagtaaaagaagtgaatggttttgatgttaactccgtcaaaataatttgggagcagagcttgtatcctgaggtatctttaaagtttgtgaatacatgtaataatattataaaaaaacgaatcaattatgagtcaaagagacaccagtactcgacttttgataaatattaccattttgttgaagaaattggtgttttagatgaagccaacgaaaaaatggcaaaggaattaaaaaaataattaatcgcaaataattaattggctaaatcgtcatcgtctaaacgctgacgatttttttgtatttttttctaagtaaaatagagataaaaaatattattcgtaccagttaatattatgagtgttgaaggtaactcaacaaaatgtggtgttaaaccaaggaggaattttaatgttaacaaataatcagatgcaagtagtttcccaacaggtaagtatcagcagtcagttcgatccatataagggatactgtcgccaataccagtacatctccattaacgatgtcgttcttatcgataataaactaatccttaaatactctagtggtaaacattttaaagatgagctagttattccgttcactaaagtgaataagattaaagtatttgattcacttttttcacaaattggttggacagtgtcagatggttctggtgaagttgaattggaccagttggtgggcgaagatgctttgttgatcacatcttcagtagaaaatgtggacatggagtattattttgtggacttggttttaaaaagccagatttcctctgaagggtgtgaagactagtaatgccaagctataatcgaaagccaccaaatttggaagactaaaaatgttgatttaccctaaacgtagtttatattagcaaaggagattgtaaggaatgaataatgcaatgattgatgttttacctggacaaattaatttggttactcacactgatactattagtaccaataattacgaacatggccgggtttccgatgtttcaatagttaaagatgatttgactattggcaatgatgctcattctagcaaccggttaattgattttgtgttcgattctcgatttaaaacggattttgaagttgaacctgatttggaaaatatttattacgatatcccaggttgtattccggatttgatagatgatgaaatcaactaatggtgacgttaaagttcggggggctttcgtgtctgaccgggaattaagaagattggcttttctcccagaaaatcgaaatttacctaatatgaatccttcagactgggtaaattacctcgatgcgatggggatgggacaagccgtacgtgttcaactgcaagcgtgttcgctgatacgatccttaggtgaccaagccataaacttaaactttattgcttggtcaaaggttggtgttgacccatgggtgcaatcccgttcacgggttttggcagatctacgaggtgttttaggacttggtcagtattcggtcgaagacagtactcaaatcgttgcatatgctcaactaaagggtctgcatattcgatcagtaagtgtgagctggttaagcgaacatcgccatgatgatcgtgtgattgaactactgctaaataaaatcaactacgataatttactgcgacgttttcgggatactttggccgataatcaaaccgacgatgggatagttaggctatctggggagtgggacccatattcatcatactcaggccgatttacggctcacgagatggcgatgacggctcttccgaatgcaatgcgtaagtactttgtggccccaaacgtacacgggaagtccggcgtttacgttagttttgatgcgaatcaaatggagctacggttgctagctggcgcggcccactgtgaacggttattagaccagttcgagcgtggtattgacgttcataaactatttgctgccaagttatttgaagttgatgttacttcggttacatcggtgatgagaaagttggcaaaaactttgatttatgccatgttgtatggagccggaggaaaccggctactaacaattgttaataaaagtggattgcgaattcaacgtaaaccgatggaggttttacattacttgtatcctgaggttgaagtacttctacgtaaatttaggtgtagctctaatatttattatgcaatgaaaccaacacggttgaaagcacgcattggtcaggaatggctatcgccgtcaacacgacaaaacttacccgttcagtctgcaacatccttgttgatgaaacaaacaatgattgagcttgggaataaatgtcatattgtaaatgtaatacacgatgaatttatttttctatgcgaaatcaatcagattcaagcaacgcaactggttgttatgcaagcaattgccgatgcggcgcgtgttttggacttgtcgttaccattaaccaatatatttaaaatacaaaagcttggaggaataaaacatgacaaaaattaatttagctatcgggttgcctttaaaggaaggggcctacaataactgtactgttgaggatattgttgccaattatgaccaggacgaggtaatgattccgacatccgtagacgtaaaatttaacattgaaggtcatcatatttcggaccgcttcttttgtcctaacgatgaccgctatctagaattagctgaatcaatgcatgccgttacagggacgtttgaactggacacggacgattggacaggaatgccatgtcagctaaagattaaaaattacgttgttaacgatcgtaaatttatccacacttttgattggcactgggatgcgaacttctttaatgccaagcaacctatgaagacagcagcggaggaaaaagatgcttcaggtgatgaacctaaaacgttgttagcagcgatgcaggctcatccagcagatccaaatgaagatccctttaaggatgtttttaaagacggaggtgctaagtaatggtcaaagattcacgctcccttagcaatccagagctagattatctaaagtcatatattaacccgcattttaaatttaccaatgttgaagtgttgggtgataaacaaaaaattgcacgtttcgccactgatcaggtcgaagagccgctatactggcagcctttcgggtttctgcgttcgttgattaagcattcttgggtgggatacatggagcaggaacatgaggaagttcaggacacatcaaatgtaacgttggctcaaagtgttgaaacgtttggtatcgaattattacggcaaagtacgggtacggtttacgacgaggataaggtacggctgaacagagaaggaattgcacagtttttgggtaaaattctcagtttgcgacaaacggccaacgacaatgagttactgatctacaactggcacacttgcacttatgaattatcccagcaggatcaggtattaggtaaaattataactgccgtgaccaacgcagtcgttccagatagctggactcaaggagtagatgcacatataacggcactattaagtcgatcattaaaacccattgatggcgatgactttgacaaaaaatatgcggcgtttggtacccgtcttataaacatggatactttgaagaatggcggcgaggccaatcctctgaagctaacccgaatgcattcggacgttcaattcgaacctaaggctaagtgtcccatgtttagacagtttttaaatgaggtcctcccggatcaacaggatcaggattttctgcaacaatatacgggttatttgctggattcttcatttaaagctaatgttttcctagtaatcaaaggggatggacgtaatggtaaatccgtttacttgaatttggtaaagaaattactcggtaagctaaacatttcaagcagcaaaatcgaatcgtttgctggtgattttggtatggctccaatggtcaacaagcgagctaacctttccagcgagggacaaactgtggattttgacactgcggagattaaggcaatttgtagcggtgattcggtcactatcaacgcgaaaaaccaagcccaatatactaccgtgttgaaaaccaaattaatcttcgtaactaacaatatgccaacgacctcagatacttcggatggcttttcgcgaagactgaatattttacctttccaaatccaaattccattggagaaggtggatgtcgacctggaggttaagctagcaaccgaacttcctggaatcctaaattgggcacttactgggcttagcaagttgcgtacaaataattttaatttcacaatttcaaaagcaatgcgtgaagccaaggatgattatatgttgtttagccggccagttgaacgttttataaaaggatgcttgattgaaaaccgaagtgcaactttatcaatgaagtatctgcgcgaacagtacagtcaatgggtaaaacgcgaaagcattgcggatagggggacaactaatccaagtattttttctaaaaagctgagagaagcatttcaatcattgtggggacagccagctccaattgttaatatgcatggacacgttaacggcttggcaggttatagtttacgtgagggagaaatgctagatgaaaagcaacaatagtaaaaccttgacggaactggagaagctccgaccctatgtcgaccggtaccttagcctttgccgaaccctcaacatggatacaacaaaacagaataaattgatatctataccggcggccgccaaattgcttggtgttgctcgtgagacggtcgatttgtggctgttagatccgagtttacctcgaatcttaattggcagttcaaaacaagtacgcttacgtcaatgtgacttgtttggatatttggatgataaggctaagcattggtatacggatgccccaaatgatgagtggggtgattattaatggcgggaactataaaaagagtttcagatggccgctatcgggcttgctatacagctggaagtggtccagcacgcacccggcacactaagattgtcatcagtaaacgtgctggtcaggcctggttattagaacaggaacaagttaacggcagtagcaatacgcgcgcaattcggaattgttactttgtggattacttcaaaatgtggtacaaattatttaaagccccagtaatttcagccgctactaagatgacgtacaaattgacctatcagcatttaaaggtattagtgcctaagatgaagatggctcaacttaatagaaccttgttgcaaagcatctttaaccagctaggttattgttattcgaaggaaacttgccgtaagcatgctattcaagtaaaagcgtgcttagcgaatgctcagtacgatggattgattcgacgaaatttgatgaatggtgttgtggtcacaggtaatgaggaacggtcacggaacgacaataacaagtacttgtcgggtgatgattttcttaaaatacgaagctatttgtttaaacgttcttacggacctaaggacactaattacctgattttggcaattatcagtgcaactggtgctcgggtgggtgaagtgatcggtctcaaatgggaggacgttgatcccgaacgacatcagctaagaatccagaggagttatgattcggctgctcgcaaaataaaggctaccaagacggtcaatgctgttcggaccatcccattggttgatgatgtggtgcgcctgctacgtttatggcatgataatgtaaaacggggtaccgggtttatttttgcaagcaatgggaagggacttcccaaggctagtagcatcaattcggccttccacacattacaacggcatttaggaatcgaggccatccatagtccgcacacgttgcgccatacagtagcatcattattggtggcacaacctgaacttgatgtaacatatgtttctcggttacttggtcatagtaacccggctataacacagcggtattatttacgggtgcttcctggcgaacatcaaaaagaagatgcggttgctttaaatacaatcgctttataaataggaggtacgtccattgagggcgtgccttttttgctgttttagggggattaggggggcatgggggtgtaaatactgtttctgtagatttatgcagtcgatttaaccggatttataaatatatattattatcttgaggagatagtgtaatggcaattgttgccgaacgctatctctatttttatgtattcgtgaggtgatgataatgttttgtattcggatagtaattggtgatgatgtacaaaagcggaaggaagggtgtcaaagcaatggtgtcttttgatgaaattctgggtcggatttgtgagttgtttagcgacaatgttggcgaaccagtgacacctgatcaagtcgggattgagagtatccgactatccaaggatgaaattgattacccaggcattgagccagaaacgttacctgagtgggttatcgtgcacatgtttatttttgaagattggtcaggctatgcagtagttgatttgaagcaaaaaagtctttatgggcttgggacattttgtctcaatgattcttctagcggtaatagggggtagtggaatggtagaaccaatggatattgaagcgcttcagccaatctatcggcaattggatgagttggtaggcagcatgtggtaaccaacagtcagctgataataagaattcaggatacaatagctttatcagcaaagggcttaatgcagttgctgaaaataggtttgataaggcactaacttattttgataatgcattgacgcaaaaaccaaaggacagcaaggctaaggcttatcgtgaccagactcaggcctatttagatacacaatctgagcttaaagatggtgaggttcaaaaagctgtgacaacagtgactaccgggacaaaagttacgaatgatgcaaagagtctcaatactaagctgagcaatttgaaggagaaactggtagttggaaatagcttaaataataatattcaaatgtaataccaaacagtttacaagctgtttggtattttttgtgcaaaaaaatcggaggaaaagtaatgaacatgtggataaaagttgctttggaagtaacagtcgttgcagtcactaagttattagatgaagttggagggattaaataatggccgaagtgaaccgtaagcatatggagaaactaaacgttactgtggaacaaaagatcaagggtgagttcacctactggaagaagtgggtctggaacaaggatgaaccactagttatggtattagctaattacccagtgaccggttctgtaatgaaggatagtttgactggtatcttgattcgaaatgcgattgtggatcgtggaacttttggtggtgttgtgattgcaaacctatttaatgcgcaagttaagtggccatgcaataagcgtttagacgaagcttcggcaccggatgggattgaagaattaatggctgcgactaaacatgtggataaagtgatccttgctactggctcgttatccacaaagtatgaagtagcaacggttaggttagctgattatatcgatcaatgtaaagctgaaaaacaacagaaaaagctgttttggctactaaatgatggtggtaaaaaggttcatccattagcgttgagagatgcgccgtgggagttcggtccagtaacgactattgatgaagatacaactaaaccagagaagttacctgtgaagccagaattaaaagtggttcctaatgaaacggaggccccagcatgagtcgaatctatttaaatccattgaaaggacgaaaatataaagctgagttgagtctgggctcgggtggaagtcgacgacgtaagactaaaacctttaatgaaatttctcaggctaaacagtggttacaccaaatggaaattgattatgaccgtggaactacgtttgaaatggctaactggcgcttcttagattattacttgcattgggtcgatctatataagcgaccagttgtgagcccaaatactttggagacctatctaatcagttacagtcattacgagagattctttgaacgagtgaagatggaagacgtaactcgtaaccaaattcaggcttttttaaatcagctgggattaagtcatgaaacgggccgtaaggatttgcaacatattcgggcttgtatgcgggatgccgttagcgatggcgtgctagctcgtaatccggctgatggaacgctacaaatcattgctgatccaagccgaactaagccagatgataagaagtttatgccaattagtagttttaagaagattcgagactttctgctaagctatcattactttttggcagatgtgaatcgcctcgtattaatgattatttcgcaatcaggtttacgggttggcgaatgtttagccttaaaatacgaagacattgattttgtacaccgtactttacgtgtagatgagtcttgggacagccaacatctagttttaaaaggaactaagactagccatgctgaaagaactattcctttaccgaatgcggtattgaatgttttaaaccgttggattcactaccatcggcaggttctatttaaaagcggtattaaaaatccagatcattttcttctgttaaataagtatgggatattgccaaattcgaaaaatattaatgagacctatcatcaattacagaagaggttaggtcttccgccaaagtttagtactcatacactaagacacacgttggctagtctcatggtaactagtaaggatatttcaattgtgtatgtgtcgaagtatttgggacatgccagtgtgatgattactcaaaagtactatattggcctattgccggagcaagtggatgttgaggctaggaaagtattgaaggtgattgctgagtagtagtaatgaaaagataggccagtaatggtcactgacttatctttttttgctaattgcggtaaataactataaaatgtagaagtcgaattttaattaatgaaaattctagaaataacaagctcgtgagtgttaatacgaacgtacgttctttgttagtgttagtatataatttggtacaatcccttttaattaataagctaacaaatctgtctgggaggatgctaatgcaaaaatacaaagagatatttgacgaaatgatgatgaaattaaatgttgcaactgaagaggaagacgtgcgcatggcttggggtgctgcgctgtcaggtgcaacaggtaaaatatttgaacaagagcatgacaaacgtgatatgtcatacaataatgtgtttattgaattcaagaataaaggattatttcataatagcaaaaaatcaaaaaagtttattgaggctgttgataatcgaataaaaaaatatgtcttacgggccagtgaacgcagaaatttattaccacatgagtttattggaattgttatcgatggagtaaatattgcttttgttaaagtaaatgatgacggtagtacggagactggaaatttattgcgaacaaacatagacagctttaatttggttatagaggctattaacaccgaatttcggagaggattaagtgcccaaaatttaattatagattttggtcctaagtcgccaattggaaaagctattctaagtgagctttataatattttgattaaagagctgagcattagtggatcaagaacagaattattttatgaagaatggaaacaattatatggacaagtatcagaaccggctatgtggaaggcgaaaagttatttgaagaatcttccatttccggatgatgcgaaaatgtctcaatcactgttcactatcaatacgtataattcgttattagtgaagttattagctgccgagttagtatctacgttcaatatctctagttttagccattatgcggagcatatcgtttctttgagtgatgataaagtaattgatagtttacgtaaagaaattgagcttagccaatattttagggaagcgcaattaaacgattttgtaagtgaagtattatttagttggtacacatcgttaagctatgcaaaaaatgatgacttggctgttttattaaaacgaatggcagcagaattaactttgtacaaccttgatcaaaaaaatgctatggaatctggagatgtattgaaaggcttttacgagggcttagttccagattctttaagaaaatcattgggagagttctatactccggattggttaatagagtatacgctatcaaaagttgataaatcaaaaataatgtccagtaagattttggatccaacagctggatcaggttcttttttaattcaggttattaatataaaaagaaaagaatgggataaaaaaggcattgatcataaaacacaattgaaaaatattttaaaagaagtttatggatttgatttgaatcctttggctgtgcaaacaggcagggtaaattacttatttacaattattgatttaataagagagaatccaggagagagtattgagattcctattctactgtctgatgcagtttatgcgccgactgaaggtgaaaatgatattttcacatatcagattggatctagtactgcgaatttaacggtaaaattaccgggttatattgctagacatagatcacgtattaagcagttgtttgaacgactagatatgtttgtaaatgatggccgagagttttcagatgtttcggagagtctgtttaagtcattgccctttcttaaaaatgatgattcgtttgttatgattgaggaaacttacaataatgttttgaagttgcaccagcaaaactggaatggaatttggtttcaaatcataaaaaatttcttttggtctgctgaaactggtacttttgatatggtagtaggtaatccgccgtgggttcgctggtcagaattaccggaattatatcgtgagcgtgtgaaaccaacggcgatccaatataatattttttcagaacacaagcgtcatggtggaaatgagctagatatatcggcccttataacttatacggtagcagataaatggttaaacgaggatggtatattgttgtttttactaccacaaaatcatcttcaaaatgattcgtcttccggtttcagaatgtttcaattaggggactatactttggcacccatgtttgttgacgatttaaaagcattaaaaccttttcctgatgcggtgaataagaccatgctattaggactgagaaaaacgttaaatacgattaaatacccggtaccctatgttgaatggaaatctgttgatggtaaaaaatcgataaacaaaaatacaaaactatccgaaattttaaagaagcgcattgttacggaagagtttgcgcagcctatatttgatcaaagatcaccatgggtatatggttcaaaagaaaaattacaatcatatcaagtcttgagagggactagtaattatcgtggatataaaggaattactgcagacattaacggtatatacttcgtagaggtgttagctgttaataaggctagtagcttggcacaggtaaggactagaccggaagctgggcgtaccgatattggtcctgcccgaaaggtttgggttgaaactgatgagttatatcctttgattaagggtgctagtgatatatctcctaactatttcaaagcaaaaaatactaacttagcggtattcatacctaataaggggattaataaagaagattagagagcgtaaaatatcttgtgtaaatgcataaaagatttctgaattgtatagaaatagggaatgccttcccttatgatatttagtaaccacagaaaacatcataggaggc

SEQ ID NO: 21 - DNA, 20440 bp, synthetic construct
  source 1..20440: mol_type = other DNA; note = Lactobacillus plantarum PDA6 - Contig 21
acaacttctctttaatcgtatagcgagaaccttttctgcccatagaaaaactcctccttaggtaggcaagctttgattatttgcttgtctacccaaagaggagtatatccatttgacgttaagagaacgtttttttacttttataattttttcaacaatctggtaaaaaaataaattaaactaaatttgttccaaataacatcatacaagggggattatttatgctacagtttgagaagttacaatattccaggttgccgcaaaaaaagcttgccaaaatatctggtggttttaatcggggcggttataactttggtaaaagtgttcgacattgatgaaattggttcagttgcaggcattcgtggtattttgaaaagtattcgttaattttcttgggggagatcaacaattatgaaaaaatttctagttttgcgtgaccgtgaattaaatgctatttcaggtggcgttttccatgcctatagcgcgcgtggcgttcggaataattataaaagtgctgttgggcctgccgattgggtcattagcgctgtccgaggattcatccacggatagttcaagccatcaagtttaagcactataagaaagcactcgatttatgactgggcctgcagtgctcagcctttttagtttatatggggggaattttaactatgccattaataaaagtaataatcacagctatttactacctaatagtgctctttttaatgaatcctttgactgatattatgggaataaaagacggaccctttcaattcatattaactgaatctattatattaatcgcgataatcattctgaataggcgatatgttaagcaacctatccactggctacccgttaatatcatgtcaatattaaagaagaatagtctgcctttgagcctagcaataatatttctacttattttctttcgaaaccacatgtatcaatttttaatctcattattactttcgttgattgtagcgataactgaagaatacgcttttcgtggcatgatattcagaacgcttttagcactaaaccttaaaaaatttgccacattgcaggccaccatcgcttcgatgatgactgcttcgcttatttttgcggctatgcatttggtcaaccttttatcacagcccgtatggtcagtattgtgtcaggttctctatgttattgggttaggtattttacttgcagcaatctatttaaaaaccggaagcttactggctgccattagtgtccattggttgatagatttttctagtttctattctcaaggtattgacccaactcaatcacccattaacgggccaatggaagctcttctaaaggggctctttctaaatattttattcattggcattgctacgtttatcctatcctctaagcattggaagttattgagtatcctaaatattgaagataaaatagacgagtaatcatccattctgaattcctataaattattgtttgcagcactacaatttcaattatctctgaagttttgggttacgctaagagctagtcatatcgctaactaaatttcacgtcttaacgctatgctaatatactttacgatcgagtactgtgcttactttttagtcattttaatactcataagatcacagagccctactccaactatcttcagcgcctatattatataatcagatttcatattcataacaaaagagccctgtcaaataacactgacagaagctctaaataatattaaaaaactagttgtctctcaacaacttattcaattcccgcgactttctaaacgaagccttacacctaatttcaccgtcgagcaacaactctttttctttatagtcaaaacttcgcaaatgatttaaatttaccaacgagctcttatcgcatcggaaaaattgcggatacttttcttcgagcgcatttaaatttcctgggaactcagcaaccttattaatagcatggagttgtacgctgcccggacgcagtttagatgtactcaacaaaatcacatcatctaatgcgagtgaaaagtatcgcgttcctaacttatagttaaaaacatctttgcgctgactattagtcttttttaattcgttctgtactacattgatgtccttaataatcctttgcgtaattaggtcagcagactggtctttcaaaatataatccaacggtgcaatccgccgttccagagttacaaacgatagctcatcgtgtgttgtaatgaaaactattttagccaatggtatcgttgcccgaattcgactggctaattcaagtccagtctgtttgtcctcaccaatttccatatccaaaaagaaaaggccatcttgttgttgattcaaatctgctagaattattttttgatcatccgttgcaaccctaagctccattgcaaactcattaatcataattgtattattgacggtcttacaataattatctctttgctcagcattatcctcgtataaataaattggaaacaatcattcttcctccaaaattgtcaaagttataataactcggtcatttttgctgtcaacatccaggaaaaaattcttttgtctgtctaccaattgttgcacatttgataggccaaagcctcgctgactccctttagtggatgcacctaattcgaacatcttattcacgtcaagtttcttattagttgaatttctcactgaaatttctttcgtttcgtgtagcgagttaaatgcacaagttacctgcttatctggagtagacttggccgcatcaatcgcattatccaataaattaccaacaatccgaacaacatctaccaaattatgcttaattatgaattcactctgatcaagttcgagactcagctcaatccctttagtttgggcatcgaaaaatttctgtacaattaatccccgtaatgtttcattaccaatgtactgaattttagctatcttaccattatctaacgacgtgtcgatagcgctctgcgcaattaattctttaaagtatggtagttgttctgaagaactcccgttagatatggagtcttgcaatgacaacataatattcttgtaatcgtgcttgaaccttcttagctcaagatattgttgttcaacactcttcaaatattcatttaattgtgtattttgtttcgcctggtggctagcttcttgctttttcatatatgaccgaataaaaaaaaccatctgccacaacatcataagcaacatcacaataaatgaagttattaaagttaattgaatggtcgccgtaatattttcatttaagcttattaacataatactttcaatagcaacataaaatattagaaccagctcaaataacgatttacttaaatttaattcctttatcttctgactaacactcgctattttatgagaataccgtctatagaaaaataaaacaacataattaatagcaataacgaatattacatatactattaatagctcatgtgtgtagtactgtacacccatcaggttagagacattatacaatcctctaacactcattcttcctagaaacattgcaatattaccaattaaaacttggataattacaactagtagcaaaatcccacttttatcataatccaacaaatttttttgaataaattgactagcaaaattaatcaataccatgattagaagaataaaatctgcaacaaaaacacttaatactcccaaaagaaatgctaaaaccagtattttcaaaatgcttttccagttaaataaaccagataaaaaatagtaccataacaaaactactagaatagaggtaaatccctgataaaaggtatcaacaacaccaaaatccagcatgcgggacaccacctaatttatcttttttattaaagatttaaaaaagtttgtcagtgttttgcgggaaacattatttccatacattaatgaaatattcttaaactgtccaccacttaccttttgcagctgctcaacatttaaacttttacctactactttatcaaaagacatactatttttagtcataataataccccctccttatctgtaaatttaacatagttataaatagttttgcaaaattaggtattaacgtcaaattatgaaattttaacgttaaaattcgtttatattgtaatatatctaaagcacatccatcaattaaacactattattaaaagtgagtaaaacacatacatacagataagcaagtattacaaccatgaagggcacaatccaaacaccattatgaatacttaatactatttaatcgtttcaaatcattgttaaaataattttcctaatggccctcactttcaaaattacgttaagtcgggtgaatagtatattaataaatttaaaaatgatttttttagaattgtagtgtatcttaataaatgtacttaaattaaggaacgcatattatgaaaattaaattaactgtttcaaataaatttggcgaaattaactgctgatcctgaaaataacatttctggtggccgccgaagccgtaaaaatgacgttgagcacgtgtttgaatcggttgcacgcgctgtaattgatgtctcgggggattatgatagatgatagaaattgatttcaaaagaaaatattacccgctagtattagtgctctttgtggctggttatatgggtgcgatttttcttaatatttattttgattggttagcaatgcttacagctggaataattagtttagtaatgctatatggtttttctaacttaaaactattttttcaaccgttaccctcgccaaagtggcgtatagtggtgaagtatgtgcttttattgtttattctggaagtcattgcgattgtggttatagctattattaattcgcatgctttattgtcatttcacaatacaacattgacaactagtttaactggacgagattatcctttaattgaaagagtatggatagccttcacgctgctagtatcactagttggtgaggaagtcggaatggcctctatttcaattccgttgattcgattattatcacaaaccaagctcaaaaaatttgcgtggccgattatcaatatattgggatgcatcgtatttgcatgtttgcaccttccacattatcatttcaactggatttatcccttaatcgtcggtattacgcgttatccaataactgcttcatggcgatctgccaatactttacggagcggcatctatgtccattggatctcagacgccgttttaattattggcacattaatttaaatataaaaggtaaggcacacgttaatgctcaataaaacaataaacatcattaagaaatacccagtgagaagcttgctggtagtgcttattgtagtttttgcaatctatgtgattagtgatggggctgctgggcgatagcacattataaatacgagtgaatttgtatgcctttctgtcaaactgacaaatgagataatatgatttttcagtttttgcttaaacggctccactgtggcagttaccacggtggagccgtttttcatagtaataataatgaagtagcgcactctcgtaataccgattagcgcgacaaatagcgctctcagcgcaatcatcgtcctcacacgagatcataccgacaccgaccaaataattactatgacgattgaactcgtttagcttcgaatccagtctacaaccccacaacttagttaacacacctcatggcaacgattgccagccctcattgaacattatatttaaacctacaccaacgaggaataatgccctagaattgtcaaatgaagtgcagtactaaagaattgaagataaactctcattagtgctgcacttaggttcatgttattttttatcgatgttatttttagcgaatggatgagtagttggactaaaagaaattacagctactataattcccaaatttcccaaaatgttttcttctaataaatatgcaagacagaaaaataaaaatgctatatagtaccatttgtcatagcttttaggatatttgggcctgggcctaggtatagctagcaatgcaaaggcatatgctagccatatcatgtctttatctacctgaaacattaaaagaacaaacaaaagagaaattaaaagcgcacagcctttgaataatgtatttttcttcaggttaatcacccaccttaacaactgtatttaaccataaaaaggctagtagccataaccttttttcttgcgttttttaattccacttgagatttgatctgaatgggaccatgcatcaccagcaagaaagcctaaaccgcccacaatccattgccaaatcccaccgttaactttagaaagctcatttttttgcaatgcctgaaaattattaatatttttcattttaatcaccttttcctatatttatatttcatcaatttgatttaaaaatccggattctttaaaaatatttaacgataaaatcagtttacttttgttgcttatcaattcaatattaattgctttctatgctcttaatataacacccacccgacctatcgaacgatatttttacaaacgtcatatttttagctattatcatacaataattcaccgataccacgaaaatagccgtttagtcgacaaccaccacgacaataagtcaacatgctaatgcaacaccctcactcctcgttcaaatcttccagactcaaaaaaacgccgtagtcccatactacgtcgtccaagcggtccttaacttccgcccaatctatgtggttaatgttcttctatgatgctatgtgttgcggtcacctgaccggcgcgatgaatggcattctttaagacgaatggtgcaatcatcgtcaccacaatgatgaccaaaataatatccgaatagtaatcgtttgatagtaagtgcgctgaaaatccaatttgcgccgttatcaatgccatttcaccacgcgagatcataccggcaccgactaagtaattactatggcgactgaacccatttaacttcgcgcccagtccacacccccacaacttagttaacacaccgagcaccgtcatgaccacgatgaacggtagcgattgccagacccctttgaacgtcatatttaaacccacactgacgaagaataatggaataaacgtcgtgtagcccactggttcaatactaacgtccaccacgtgttggtaatcagtttgtgcaattgcgactccggcgaagaaagcacctatagcaccactcaagcccactagttctgccaaccatgccaacgctaaacaaataataatcgccataatagttggactggcagccatcaacagatgatcactcaagcgcatcagatacggggcaacccacttaatcacgatgaagacccctatgaagaagccaacctgttccaagagcacgataccgagattagtctgggcaacaccactctgaccacccatcatcgcaatcatgatactcaatagaatcaccccgataatgtcgtcagcgaccgcggcccctagaatcgtggctccttccttagtatccaacactttaaattcctttagtacctccacggaaatcgaaaccgacgtggctgaaaagatgacaccgataaacagtgattcaaaccagctaaactgaaagaagcgactcgcaagccccataataacgactggaaaaatcactccaataatagccacgataatggcagggcgtaaatacttacgtaaaagtgctaagttgctttccagtccaccgatgaacatcagtaccacgaccccaatatctgagaacgtttgaactaaagtcgttaaatggacccagttaaatagcgccggccctaatatcaccccgaccagaatctcaccaattacggcaggaatccccgcacggtgagcaaagtgcccagcgagggttgtcgccaaaatcaacaaacaaaatattcccaaaaaatccatgtgctcacccatccatcaaaagtcttaccatctatcatacacctttagtcctggctcatcttgtaagcatgggcgttctggaaccggcgcgcatagtgccagcccaagccgatcagtagaccaataatggcgggaagtgcccaatcaaatcctagtttagctaatggtaagtagcgttgatcccatgcaagaatcgtttgaacccatcctaaccgagtaatcagggctggtgcagcacctagaccatcaatgaacgctggaatcaaagttaacgccgtcgtccatcgataaacgagcggatcacaatgaaatagcggtgaggcaatcgctaagataatcagtgtaatcgccaacggatacaggaacatcagcatcggcgtcgaccatgcaataatttgatccaacccaatattagcgatgagaaatgaggccccacaggccaagcggttccaagcgcgataactgattttaggaaatttagcgtgcaaggcttccgcaaatgacgtcgccaaacccactgccgttgtcagacacgtcaaggtcgccataattgctaaaacaatcgcacccggcgtgcccataaaagcattggcaatctgaccaaaggcaatgccaccatccgcagacaacttaaattgcgataacgacgtcgcgccaatccagatcagaccaagataaatgactgcttctaaactaatactcaacaaactagacttggcggccgtcttagcaatcgctccggcatcccgttgaccaaggccccgaatcgtggtgacaactgcaattccgaacaacaaggcggctaacgcatccatcgtattatacccttgcaaaaaaccgttcaagaacgcgccgtgttggtaggccgcggtcggtgtcgcattcgtggtccctaacggccggctgaaggcaatcccaaaaattaaggcgagcaaaatcagaaaagctgggtttaacaatttaccgatcgtatcgacgatccgggtgggcctacgagctgcccagtaagtgatactgaagaaaatcaatgagtaagctaataaataccacggtgcctgtgccgaactcacatgactagcaataccaatttgaaacggcgtagtggctgtccgcggcgtcgcgaacaaggggcccaaagtcgcacaagtcagtaccataaaaatcgtcgcgtagcgtttgccaattggccgcgctagctcataaatcccactactgtgcgtcacactgatggcgataattcctaacagtggcaatagtgtccctgtcagcaagaatccccaaccagctgtcaaccaattggcccccgctagctgccctaagtgaattgggaaaatcaagttgccagccccaaaaaacatcccaaagagcattgatccaataatgatgtaatgtttgattgttaattttcgcgttatttgcatcgtcgtctctcctccgttaagcgtcgttctcatcaaccagtttgaacaatcactagtaggagcactcgatacaaaccaccatcactacttgttaagcgcattgtccccatcctctcaaaactgccatgagactaaaaaagcgtccttacaaaatcaattaatgattttgtaaggacgctaacgcgtggtaccaccttaattcgtcacgaaccgcagctcgtcacctttgcgcgtacggccaattgccaacactgatgacgggtttccccaaacagtaatgttaactgacgatacgttggcccgttaatgggggcacccagctaacactccagctcgtcgcattagcagttctcaggctactttccagccaggctcaccaccgcttcacaccatccagcggctcgcttaagattaccctgactttactctcctgatcatcacgtttagtctcatttatttttaatatttgcaatcataaactcattgcgtagtcttgtcaactgtttcgctaaaaataatcatccgagttaatccgataatgcccactgccgaatcgcagctgcgaccccgttcgcatcattagtagccgtcacgtgatcagcgtgtgccttagcaatatcactgccattgcccatcgcgacagctgttccggcgaaagcaaacattggcagatcattctgttcgtctcccagtgccatcacttcgtccggttgtatttccagagctgccgctaaatcctgaactgcctgccccttgttgacaccagtatgcatcagttccaagaagttagttgccgcacgtaccacgtacaggtcccgaccaaaagtcgtcttaacttgcgcttctacggcatcgagttgcgggccttcacctacaaagacccccttagcaatttgaaaatcagctggtaaatcgtcagggtctcgaatcaacagcccagctttgttttcccacgcctgtacaactgtgacccagttaacatcgcggtcagctgtatagatcgtactgtccgcatcgagcacgttaaagggcacgtgatgttgttttccaaacgcggttaattgccgatagtgcgtattatccactaaatgtttggcgacgatccggccagcaatgctctcgattacagcaccgttatacgtaatcacgtactggtcatcaccagcaaggcctaacgcatctaaataatgttgcgccccagcaagtggccggccggtacacaagaccaccttaatcccttggtcgtgggcttccttaactgccgcaatcgtacttggtaataattgcccctttgaatccagaagcgtgtcatcaatatcaatcgcaattaatttaattgtcatgggttttcgttcctttcaactgcgaatacggttacaattaagtcatgccaccgctcatcgcgaactataattctaatatagcatagcgcgtcagccatcaaggttgatttttgaaaggaagcggtgcgattttacaaaatcttgaagcgaggtttagtgatgaaaatcttacacgagacggtccagacaattccccgcctcccctttaaatattacgaacatgatccattgactgatatcaacgttgccccacactggcaccaagggattgagttaaattatctcgtcagcggtacgaccttaaaattcgtcaccgatggacagacgaatgaatatcggcctggtgacctttggactactaatcgacgcatggttcacagcgctagtgggcccaccgaagttgactgggtagagttcggcctcatcattgacgacgatttcttacaaactcaaattccggcaagtgcgaactggcaattgacattgaacggcgcggcctcatcgaaaactcacccgcaagcctacgccgatgtccgccaacaattagtcacgattcacgacctgttgacgacccccacgaccgatctactgagattacaaatcctcagctacttttaccagttacttgtcactctggggcaaacgtttaccgttcctctgactgcaacaacggtcagccctaacttgacattaacggatacggtcatgactgccatcaatcaacattacgctgagcccatcgatggtaatacccttgccgagcaatttcacgtttcgttgaccactttgaatcagcaattcaatgcaaacgtccaactatccgttaaccgatacttacgactgatccgattgatgaacgcccgtcgcctcctgttagagaccgaccataagattgaatatattgccatgcaatgcggctttccgaatagtaagacgttcaatcggaattttaaatcttggaagggtatgacgcctaccgactatcgccaagcctatgcccgctatcaccgaattgatactagttgcctctaaaaatgtcccttcgtggtctgaatttcgtggtaagctacggctatcaattaaacgacgggagattttaaccatgattaaattaatggcaactgatatggatggcagctttttgcgtgacgatatgacttacgatgaagctcaatttgcactgctttatcaacaattacaactacggggcgtacggttcgtgattgcaagcggcaatcaatatttccaactcaagtccttcttcaaggactatcctgagatgatctaccttgctgaaaatggggcttatatccgcgatgccgaccacgtttacgcacttaacgcctttcagccagacacaatccagacgattctgaataagattcaaaccatcccggatttaaagctactggtttgcggtgccaaaagtgcctacaccctaacgaccactaatcctgagcacgtggcacaaatgcgacattattatcatcacttagccgtcgttgaaagttacgaccagcttgatgatgacattatgaagttcgccatcacatgtccaccagaacgcaccacagcgatcgtgacgcaactacgcgagttactaacgggtgtcgccgaaccaaccagcagtggtcacggcgacatcgacattatccaacccggcatgaataaggcggctggcttagcgcaactcggccaggttctcggaatcgacctcgcagacatggctgcatttggcgatgggggcaatgacctagaaatgctccgggaagtcggctgcggcgttgccatggcgaatgctcaaccagccgtgacagccgtagccaacgccacgacaggcacaaaccaagaacaaggcgtcttacagtggatcaaaaactggttggaggcgtaagccatgcagccacggttgaccaccaccatcagtattcttagcctctccactgtaacaggcatcactaccgttattacaggaatcattccccagctcaagcgggcctttcccaccgtcccgactacgctgattgaatggctcgtcaccatcgccaactgtagcgcattgattactttgttactcaacccccgattaacaagccggtggggattacggccaatcgtgattagtggactcttgatcagcgccatcatgggactgattcccgctatcacgactaactttaccgtaatcatggtcagtcggctcggattaggattaggcgtcggcctcttttcaccacatgccatcagtttgttgacccacagctttaccggtgatttacgggcccgactgttaggttaccagacgggcctctcagccctaggtaacgcgatattgctaggattagcaggcctgctgatcagtctcagttggcatgccgtcttttggctatacgggctactggtgattgttgctgggggcgtggcgtggttggtaccggaacccactgttccatcaacaacgactaatcacgcacgcactgaaaagacacaactaccacggcaccagtggacgttactaggactcacctttatcacctatctactcatctggggcgttcaattaaagctgccgagttactttagcgcccgtcattttggtaacgctgccactatcaacttaaccttagcagccatgaacatcggtggcttgctggctggtctcacctttggctatctataccgctatttacaccggttcaccttaaccttaggctatgccggagcagctatttcagtcttagtattatggttggcatccaatgcaactgtggctattggcgctgccgtatttttcaactttatttactcgtacaccgggccatatttggtcttcactagcaatactggcctggataccattcaagtcaacgtcctgagtagctacctgacgattgccaccattatcagcgctttctttgcgccactggtctggaacagtctcggccaacttgggccacagacgctcaccgccaacgttctcatttggattatgctcattttaggtggcttagccttgattaccggcagccatcatccacgaaaggaagtttaattaatgaccaataataacgatcgtcttcatactggcgaactctacttacctaacgaccctgaacttgaaaaacgccaatttggctatctcgatcagctctatgatttcaaccaaactcggcccagcgaactaaccaagcgccaaattctacttagcaagatgttcgcagaaatcggcccgaagtgttacatcgaaccaccgtttcacagtaactttggtggacaccatgtccactttggcaagggggtttacgccaattttaacctaacactggtagatgatacccatatttacgttggcgactatacgatgttcggccccaacgtgacaattgcaaccgcgggccatccgattttgccatcattgcgcgaacaagcttatcagtacaatatgccagttcatatcggccgtaactgttggttcggcgcaggtgccatcgtactacccggtattacgattggcgacaatgtcgtcgttggcgctggtagcatcgtgaccaaagacttacccgataacgtcgtcgccgtggggaatcccgcccatatcttgcgacacattaatgatcacgaccgtcagtactactttaaagaccgccagattgatcctagcttgttaaattagtggtttcaaaaaatcagtccatcgcattcgctgcctttatcacggcagaatacgacggactgatttttaatatgcgtcaaaataattaattctcgttcattttttgccaacaccttagcaacgttgatcgttggcaacgccacagttgggtattcatttgataactgctatcctcaacaacatagccttaagtttagaacagccattacaccacctaactatttatattatattcgagtaacccatcattactgattgttttatgatacgaacgtctgctcaacctgactacccgtaattaagatcactatctgagctgtagctcaaataaagtattattttacaatataaacttcaaaaatccttggcttaccaccaaccataaattgaacgacatccttttcccaaaagggtaaaatatcatcctcaaagctgtccattatgaacctttttaatttaggatttttattcatgaaaaaatcatatttatttattattactgcaattttttgattgggtatccagctcaagtctgtcatccaatctgaataggcagcaaagcctgcataatctggcattttaaattttttacccataaaattcagatattgacgaaacgtgcgaacttttttgcctggtactgtaacaacaaaataatttaaatcattcaatcgttctttcaacgacacaagctcaactttatcgacaaatgaaattttattttccattattacctcacttaactttccgaatctaaaattaaagtgtaatacataaaagactacccccccaaaaaccatcgaggcctatttcccctacccatactcaccttggaaacacggattaggcgtaaatccaaaccggtaaattcgcgattttatttccaaaagataatttatgcgattcttaattattactgaaatccaatccattcaagatgttttgaaccaatacgcatggtagacacttacttatcaggtatcatagatggttattttattaactgatccactatttaacgtacgtgttacacttgttttgagaacccggagtagaaaaattagtggctaatttgattataaaaatcgcctttaatttctaacattcaatgcgatatcttcatttttattttcagatagcagaataaggcttctaccaaattgctcaatcaatcctaactcactataaatataaaatttacatctatgctttctatcaggattatcgtcaatctccatatcaatctctatttttacacgcccagaattatcggccggtaaaaagcttaaagaaaatgctggtgtaaaatttccttctttttcaccaaattccacataaatttcttctttagcgtcgaaagaatatgcaataattttctcgccaatttcttttaaatctgtatcttgtacatagcacagttgatggattgttacaaattttgatttcgcattaatacttagttctaataaattattatcttcccaattttttgatatttctaaattactcatattttctcctctcgtattacttattctcacattggatgaaacgatacgacgaaaccgttgtccccatatgcgactcgatatacttttccattaatgttatagtccgcctatgctgtttacatacccctttaaaaataactttcagcaatatcaatgtcatgtgccatttctaatcctggaaactttttatccaatttccttaaacaatcaataaacttttgacttttcaaattggcagaaatatcctcaaaaacttcactgatccaatataagtccgtccgcatcacaatcttctaaatactttattgtaatatcctcattaagagacaaaagttcagtcactttgttccaacatttttcaataccacaatcatcatccacatttaattttttccttcaacctgtccaaacttgcggacttatcccaagtgacctgcgcaacggtctattttgcacatctcttactcaccaagagaatatggcactaacgagaatcggaatcagttaatttgacattttagataataactctgttataacaaactatagatcagatgctttttccttgaatttattatatattttcataaattcttctttttgagttctttatagatttgtacgtatttagcatttcatctaagtagttccagtattccccgggtgcgtctgtttttggaacaggattttcttctgagtctcttctagttccactaaaatctccatccgttaaatgatcagcaacattattatttacacttttcttttgagcaggcgtcaactcttcttcaatactttttggagttttatctccactcattttcttgacctcatataaacatcattaatacccaactagatccgttagaaatgatgcccttattttcataccagtaatcgtctaaaaagtccagaacgcgtaatttcatcaacattctggatcttcaaccgacttattttgtttgcttattgaatcgttgtcgtctccaaacaaacaacaggacatagataacggtaatcaccaaattaccaactaaactagttatcagttctcaaatgccgtcaccaagtacccgcacaaagactaaccggacgataaaataccaacatgtgttgttgcctccctcataactcaacttttctatgaaataaccgatactcggcaattagcccttgtcgaatatcggttattttaatctgactaattcatattacttatcggcccggtgcttcccccaaacaaataagccatagtaaatcaaactgaataacaagctaccgactaatgacgatactagcccatgtgtcgcagtttgtgtcatcacagctaagattgctcgaacggcaaaataagctactggaataatgacatctactaaattagtttgggtcctttttctcaaccaataactccataatcctaatcccagcgtaattcctatgatgactgctcaaataatgataatcattgtcattttttactatttttgaatacctttacgaggtccaacatcaccctttccattgccatacccatcactgtcttatccagcaaatcatggatatggtccagaacatttaaaagctgcaaattttgataatagctaagaattttcagacttgtcataagtgattagcacaatggtataccatactaatcgtggaacactggactaacaaaagccacagttgaaccagaaactcatacccaaggaccaatcgatgcgctcctgaaccatcactggtcttcaagttatccaaagccatctggaatgggctaatcagctaaaatcctgattaagaacgagttgaaagtattgtacttgatttaataactcagggattcttgtttttaaaatggatctttatttattatttcagctttaagacctttactagcaataattattggtgctgtgtcaaaatcttcagcattaatcttaaatatataatttccttcttctacttggtatttatcgatgactttccacatttctttgcctgctaccaactctataaatggcttagaattatttaagttccaatacagcaaactagacagataataaggtttcctgaaatcaatgttaatagaaaactcatcatatgaagtatctattctacctgctgcaacaatatctccaccatccacactagcaaattcaaaatccatccataaacatttttttaaataattgttaacctttaatatttctgaattgatttcttctatattcatatttctctactctttctctatttaccgacagggatatgggtattcttagaagctttaggattaaaatctggattaggcttaccacctttatggaactcttttagtacgctctcatgccaccaattctcatcaacatccatatattctacctcacttctttgctttcctgagacaggcacagagttcagggatgtccaagccacacctgctaagcataaacacttcttaccggtaacggcaactttccccgtaatcatggtataaatatcattatacctaactagattcgtcaaaaacgaaataatgcctttattaatacctgcaatagtctaaaaagtccagcacgcgtaatttcatcaacattctggatcttcagccgacctattttgtttgcttttgcttattgaatcgttgtcgtcccccaacaaacagtagggcataaacaacggtaatcaccaaattaccaactggtatgacactaccaactaaattcaacttattgcgtttccctaatgcataactccaatagcccaagccaatcgtgattacccccgtaatcaatccaatcacaataaataccaacatatgtcgttcctaccctcataactcaacttgtctaaacttttctataaaataaccgatactcggcaattaatccttatcgaatatcggttattttatttttatctgactaatccatattacttattagtccggtgcttcccccaagcaaataaaccatagtaaaccagactgaataacaagctaccgactaatgacgatactagcccacgtgtcatattttgtgtcgtcacagctaaaactgtccgaacgacaaagtaagctattggaatgatagtgccaacaaaattagattgattcctttttcccagtaaataactccagaatcctaagcccagcgtaattcctatgattactactccaatgattataatcgttgccatttttcaatctccaatcattttttgctattttcatactcttttacaatatctaaaaaatcatttctccaagaatattctttcgcatagtctaaacatgatttgccaaatccatctttcaaattgtaatctgatcctttattcagcagcaactgatacatttctttattgtccgaagttggcaaattatttattgtaatagcatatttcaatggaattgcattgtatttgtctgtcgcatttacattcactccatgtttaatgaaaagatttgttatttccatttcatattctatagtaggtcgcaaaacacaaaaataaaataaatgaagtgcatttcgtttttctttttgtgtagcataattcacatctattccttcagcaaataagaactttattatttgaagtttttcttctggatttttatcattagtaactgccatacataataaattcaaatccaagtttccactaatcacattaatatttccttcataaaaatttttaaagtcttgaaacgtgccatcccttactgcatcaaaaacatttaatattttcattgttttttcttctcctttttattgttcatatttatgatttctattagctgaaggtgtctcaaatccaaaattatttgggttagcttgaaactccttcaatattttcttaaaaaataaccggtacccggcaattatttctcatcggataccagttatttctactgactaattcattttacccattagccagacgctcctccaaataaataagtcatagtaaatcagggagtttattctataaggaaagtccgtgcatacaagccttaactatcactagaattcaaactatcaaagatgctttgaaatactggccacggcaaacacttgcccatcagccatcaatggatggctctacagatattaatcagcccactatttaagaatgactcgagggtgttacacttgatttgacaattcgagattgaactcaagtttaaaattcaggaaaatatcaattctcaaataagctagattcttaacattacttcatcaccactagctaccggagaccctaactaaaacagtgcgatgtatgttattttagttattcatcttcataaattactgttcctatgtaattaatacgatagttctcacctgtagcaattttcctaacaacttgttctgagagcgtaaaatatcttgtgtaaatgcataaaagatttctgaattgtatagaaatagggaatgccttcccttatgatatttagtaaccacagaaaacatcacaggaggcattccccatgaatgaacttaccacagaaattatcgctgcactagcccaaaagcaagatttggacgaagtttttcgtcaccacctcgaaa

SEQ ID NO: 22 - DNA, 18009 bp, synthetic construct
  source 1..18009: mol_type = other DNA; note = Lactobacillus plantarum PDA6 - Contig 22
aaaatatcggcgcctctggcgcaattgtgagcgaaagctgaacaccagtaagatgatgattagcttagccttcctgcgaatactcttgaaaagattctaaacacgttctgataactttttttcagtggttagtggtactagcgtccggttatcaagtgtccgaagcgttgtttaataataaccaattaggagataagatttttaattggggtggcagttctttaggagagcagggtgatggagttgttaagttttatctatcatggcatgctgtcttgcacacggatattttagcggttcagaagattattgggacggtcaatggttggattttattaggtctgtatcacacggctcaggctttagagagtgtgttcatggcggttttaaaactgtttggcttttttgctaattttaatgttggtgagatggggaccctttataagaccatcgtgttattaggatttacgcttttaactgttgggttagggtccgtctgaaaactacttaagtaagatgcaaattgagtcaatgtagaccgtagccagataaacgtgagcaagcttatcataacgcgttgcaatcctacgaaagttcttcaactgattgaagaagttctcaatcaaatggcgctcacaataaacgtggtaatcacaggcccacttgtctttggtattttccttagaacctgtttaaaatctagctaatttggtatgatagttcaaaaaaggtgatcagtaatgaattatcccagtaatatttctcgccgacaatttgaactagtccgtcccattttagaaggtgcacgacaatcaaccagaccacggaaatatgatctttacgacttattttgcgcggtggcctatgttttaaaaaccggctgtcagtggcggcagttaccagttgattttcctcgttggcaatcggtttattattattatcgagtatggtctgaagaacaagtccttgatgaaccttctattttggatcaatgcttaaaaaaattgtcattaccctacgggaaaaacagtcacgctcggctaaaacatcttttataataattgacgcccaaagtgttaaaaatactgataccgccaagcatcatggttacgacggtggtaaacgaatatctggaataaaacgtcacttagctgttgatattaacggtttgccacaagcaatccatatcactactgccaatgtttctgaccgtgatggggctagtgccatgctagcgctaaactgtgaacatttacaacaagttaaatcagttcttgttgatggtgggtacaccggggacaacttcgccgccactgttcaatccaatttaaaagccaccgtacaggtggctaaacgcaatgagctacataaatttgaagtgttaccacaacgctggattattgagcgttctttcagttggttagataaatgtcgtcggctctggaaaaattgtgagcggcaccttaattcaagtcgccaaatgatcattctcgctttcttgatattactcttaaaaagattttaaacagattctaatgacttcttaactaatgaggatagtggcttaccagttttcttagaacccgaagccgtgcaattacttagtttttggtgccgaactcaaaaacaaatgcaccggtttattggcatcatcttgaatgctaaatatcgagttgaaaaggatcatcaggacattggcgtcataatcccacttgatgatgaggaactgaagcctttaataactaaagccttgaggcgctactttaacgcccttagaagcaatgagaaacacatcaagaacgttgaaaactacttatacggcaccatgcaaaacctatttggagtttggtgaaataaacaagcggctagagaatatgctgctaaacaccccgaggaacagaacgctggcaatgaacgcacttggaactaaacggcatataagcccatttaagccgtcttaaacgaacggacacaaaactatattagattgcatttaaaatgtgtttaaagccgttttaggagccaaatattagggcctattagctatccataggaaagatggtgctaccacatggaaattaaatacgataactgctcagtatagctttagtaggagtctgttctgtactgagcatattttcaacagacaaagctgtacttttgtttcgacttactcgttattgaaaggcagttaaaatgaacaaagaaaaattaaatttatggcatcaggaagaacaatatggcattacaggctgggatttttcacatcttgatggtcgttggcaaaatgaacttcttccctggaattatcggaaactggttttaagctatttaaaatcagatatgcagctattgaatatgggaaccggcggtggtgagctgttaaaaacttttcatcacgctagtaatagaacgcaagttacggaagcttggcagcctaacattaatcttctaaaacacacgattgccaaacaagggatcaaggttcatgctttatctgcaaagtatgaagatgccttacctgttaaaaatggttctctgaatatgatcactaatagtcatgctgccttcaacccaaaattaatcaaagataagttaaaaactggcggttattttatcagtcaacaggttggggctttgaacaattattcattgtcacgctttttcgattcggattatgttccggcatatccagataataccttgttgaaaacagtcgcagattttcaaaatttgggttttgaaattttgttagctaaagaagctcaacccagtatgactttttttgatattggggccattatttattacgcttcaattattccttgggagtttcccgatttcattgttgatcactgcttatcacagcttactcaactagatcaattaattcaaaatgacggttcagttactactaaagaggaccgcttcattttagttacccgaaaaatgtaatctattttgattgaatttgagatgctttatcaaactaaaaatgaaccgaaaaaatgattcagaaaataaaaacgatcggcctagttattaggttgatcgtttttgagtttattcggtttatgggcattaacgtaatcggcaaatatctttaaaagttcttcggtttgttcgaccgataggttattagcttgaaagtacttttctaataaagcccctttttgaattaatcggcgagaacgtgctttgcggtcttgccgattttcatagtatttagattgtcgtaatttaaaatcttcccgctcaattttttgttttaaacgcgcttgttgttcaattagtttttcatattgattaggcatggaattccccatctcctatgactaatgatctacggacttttcctttaaaaactcggatacttttttggataaggacttgatattgtcattagataaattagcataaattggcttgactgattatttgttcacctagccgttgttcaatcttatttttttcgtccttaattttttgattaagggcttttaatttagcttcttgtttttctaagttactttgagacataatgattcccccagtcgtattaaaaataatcaccgacactatatcatacagagaacgttaagtcaaagtatgaaagttgaaatagcgaagcggaaggcatacactaaattaaagttaagagaatcagaagaccgagtgaaacgaggtcaatgcgcacttacacatagaataaattctatgttgtgttaaccccattaaaacctgtattagaagtcgccgttggcgacaacaaagtcaagcccatagaatcaaagtaaagaggtgactaacatggcaatatttcatatgagttttagtaatattagtgctggaaaaggacgaagtgccattgccagtgccgcttatcgaagtggtgaaaaattatttgatgataaagaatgccgccactatttttatgcccgctcggttatgccagaaagctttattttaactccaaaaaatgcaccagaatgggccagtaatcgagaacaattatggaatgaagttgaaaagaaagatcgtaaatcaaactcacggtatgcaaaagaatttaacgtagctttaccggtagaattaagtgaatctgaacagaaagaattactgacaaaatatgttcaagaaaattttgtcgatcaaggtatggtagctgatgtcgcaattcatcgtgatcacccggataatccgcatgcgcatgtgatgttaactaatcggccctttaaccccgatggtacttggggattaaaggcaaaaacgcagtacattaaagatgaaaatggcgagcaacttctaactaaaagtgggttcccaaaacaaagaaaaatttggttagttgattgggataaaaaggaaaaaattaatgagtggcggcataattgggcaacaagtgttaatcagtctttagcacaaaaaaatattcccgatcggattagcgaaaaatcatttgtcgatcaaggaatccaagagacacctacccaacatgaagggattaatagtcagagacaaaatagaaaagcgtttaatcaacaagttagagcacaaagaagcactcaagctaagtatcataatattaacgaaaagatccgaaatcatgaacattttgacgcattaactgacgagttatcattttccgaaaagcacacgattagccacctaagtcaacaactgaaaacttatgtcgatttagaacacttagatgacaagcaacgcatgctatttaattggaagaacagcttattaatcaaacacgcggttggtgaagatgtaaccaaacaactgctgactattgaccagcaaacgacatcactagcacaagctaaccagttgttaaataaagtggtggaacgagcaacgaaaaagctttatccggaacttaattttgaacagacaaccgcggctgaacgacgggaactgattaaagaaactaatagtgaacaaacgattttcaaaggtggcgaattggcagaacggttagcggatattcgaaacgacttattaactcagcaattattgacgtttaccaggcggccatataccagctggcagttagttaatcagcaaatccagacgattgagaagcaattaaccacggtactagccaaacatggtcaccagttagacgatttgaagcatactgatcggggcatactagccgcttatcaaccaagcgaactcgaattcatttctaaagcggtcaaagatttacgggtcatgcgggaagttaaagccgtggtgcaaacccaatacgacagaattctaacgactgcttttccgggcagtgacctggataagctagagacgattgataaggagcaaatctataccgctgtggtttactatgacccagaattaaagccattaagcgccgatgatcttagtcaattacaacagcagccaccggtagtctttactagtcagcaacaccaagccggtttaaattacctgttaggtaaaatggaattaaaagatattcgggatcatcgactgcaacgggtcttaaaacatgatggcacccggcaactgtttatcggcgaatgtggccaagatcctaagttggatcacaaacaaattgaaatggtgcaaacccgtttgaaacaacagacaatgcgctttgatcaatataagcaagctcaagttaaggactatcaggccattaattaccatccaactagcccgaaaaattacctgatgaatattttggacgaagccttaatgaccattttatatgcgaaaaatacggactatctaagaaaacagcgactacgtggactaaaggagaccgagtgggaaatgacgaaaaagcaacggcaacaccaaactcgaaaccggcatgaagatgggggcatgcacttgtaatcaaaaaattagcgactggttaattggtatgaatggtagcccataatgtattttacaatctacctttttagtattattatccttaaaactatcaactataactaatttaaaatcttcacacctgaagggaatggatttaacaaatctactcaaatcactataatttccataaaccaatgtaattatcattatttttctatacatttaaattttcctttaattccttattaactaatttatgccaagtaatcaaacttaaaataaaaagtaagctatctgataaaacaaaagaccaagcaataaccaaaatattatctgcaagtattataataactgccataagtaaaactgatattgctaaattccatgtattatatggcttaacagaaatagcatcaatcggatttcttaataacaaaaattgggatcttggtactaaagtaattagtaacaccttagcaatagttaaatccctaatatatttactgctatacagaataatcatgattggttttgcaaagataaaaccagctaaaacagctattattgatacagcgaaataaagtagcatcaatacttttagttgctttttcacttctcctaaagatcgatctactaaagctttacttacagttggtagtaagattattccaatataactgaaaaacggaagaaatgattgtaatattcccgtagatgctgaaaatatccctgaagaatttttgccaaattcacgattcacaataactaatggtaataaataataagagaattgaattacatcaccaaagattcgaggcaacccataaatcaatagttctttgattcgcttcttaaaacttttgatttttttcaagattggaaattgatttaaaaaagaaaacaatcccaaaaaaggtatacttagcaaaatattagaaattccccaaaaaaataatattgtagctacgccatctaatctaaaaataaaaataacaatcatatctataatctgaattaaaatttgaattacagtatacaaatagtagtattctgctcctctatacgcagaaaaagaaaaagtattaaaacaagttccaatagcaaatataatcattggtagacttaaaaaactatatttagcactaccaaataacaaactagaaatactatttgaaaagataatacccaatataatagctaaccctgatgctattatcatcaataataatccggtttgataataatcgtatgctctttctctattgatatgtttattcatcgcaaaataccggggtacacttataccaagttctaataagacaataaagcccaatacagttgctgatcgtttcgcaatattaaaaacaccaaactgagaaactccaacataaattgcaaccattttatttattatgaaattagttaacaatacaataaattgaccagtaaatgtaatgaatgtatcttttaaaaaactactattctttatttttgttatcacgatatttatttctcacaatcattaaatatggtataaatagcactaatgaaatcatataactactatatgtccatggacttattaagaagctctgcataataaagaaataaacatttaataaaataaatgaatttatataaattccacgtttattttttaaatacaaaaatgatatacaccctaatgaaattaatactacaataaaaagtattgaaccaataatgctaaaatcttgaatacatcctctaaaaacggtataaatatttgaagaaaagttttcaacatacactggtgttgaatagacaccttgagcacgatttctgatgcctaaaaagttcataatacctaaaaaagtattagatccataatcaaacgttgtaatatttcgattattaaaccaataatcaaaaacgggtacattcccaaaagcatagactaagaatttagtccataattgttgcacaagcagtatcgaaaactcaccaacccgtaaaatcattgaggaaaataaaagtataactattccaactccaataaaaaaataacttaaaacattttttgtttttatacgtgtaaatgaattatctaatattttagcaataatcaaagaaaatatgaataaagttactgcagcaatccatccactttttgtattctgcgtactcatagtaaatagtgtaggcgtaagactgattagtccccatcgcttttccttcttttgatttgaggagcctgcatgataaccacctacaatgggtgctaaatactcaaacaccaataaaatttgtgctattcctccagtttgtgtagtgccagaatatctcataactgctacttgattattgacattcatcaaacttgaaaaatccaatatttgagaaatagagacaccttgactgtgcaaactaactacagcaaaagcgtctccaagtaatgtagtaataaataaaataactctgcttctttttacattaaaaataatattctttttcttaacacttatatttaacataaagaattttattggactagtaataacaaacgtcattaaacaagtaactagtatataaaacaatccactgtaactgtaattaaaatttaatacaactattcctatacctatcattaagcaccaaaatgtaacaaataacatagcgggttctatgaaatcactttttaaatatagtttattcactgccatacatactattagtaagactaaacatcctactgaaaataataatctctccgacataaataattacctcccaaattgcaagaacaaattagccacacgataaatcctattaaatcagtattttcattaatattcatattttatggacttaacttaaccggcgaaagcagcggagaaaagctctttgggtgtttgatagccagtttgccggcgcggtaaattgtttagctttgactcaactgcttggatatcatgaggacccaaaatatccatggatagacccttgggtacatcgcggcggatcattcgattatgcgcttcgttagtcccacgctcagaggaacgatatggatgggcataataaaggtcagcgacaccggtaagtacagcgccaacttccgagaactcagcgccattatcggcagtaactgacttcatgattgatccgtattcttgacagatcttggccagctcatagttgactgaatcggcatcacgaccatcgatcaaacgtagaatttggcagcgggattgacgctcgatcagcgttaagatcacactctcttgaccgttgcgcttgcccaccacggtgtccaattcgaaatggccgaactcttggcgctggtcgatacttttaggccgttcatcaatactccgtccggccagacgcttgtgcttgatcgagtgatgctgtttggcacggtggcgcgttttttcgagtagatcaagattgcggacttcaagtaactgggcatcaatatagtggtatagcgtcttggtcgagaccatctcctcaggttgatataagccttcaagtttggcccgtcctaccgctgcgtcaggcgaccaaccatcttgacgcaaatgagtcgtaaaatagtcgataaaatcagcgacaccgacgagtttcaaaggtcgatgacagtgggctcgattagcttcgtacttagcttgtgctgtttctggtgagtatgcagcgtaatattggcgttgaccattcactttttttacttggtcgatctcgccgcggcacaattcattattgattgtttgatgacaaacattaagcgctctggaaattgcacgattggaatagccttggctgtgtagcgtagcaattctgcctcgttcaaacgaagttaggtgctgacctttttttctgactgtggtattctgttcttgcatcaagacaataacctctttcattgtttgtgtaggaacatcaatgataacagagatttgtcttggtgttttttattttatcaattagctaaaagtatttggctaattgataaaataaaacgcgcgataaataattacctactaaataagaatatctttgctcgcagactgttgaaggatataattcccaaaacagaaattgatttgagtaaagaaagcttctcatactttctataaattagccaatgatatttgaatagcgacatttttttcgatgaaagtgactctgcgcgtaatcgatgaaaagtcaacacctcaggtatacatataattctttgggcctttttaatgacagtcaaccacattaaataatcatttcgtttacgtatattaggaatatacgttttgccaagtacttctttattatatataactgttgaatttccaatattatgaagcaacaagcgattataagtaactattctttttgcttttaccgtataatgtaaattatttccatcctcatcaattttaccatagtatgagcatgtaaatgattgattatttgttttcataaaattaatctgtcttgttagtttatcgggtacccatatatcatcactatctaagaaagccagaaacttcccatttgattctttgacggctctgtttctagccatagcagcaccttgatttttattctgtttaaataacttaatgcgtgaatcttgactagcaactttactaactaattctgcggagttatcagtagacaaatcatcgactactattaattcccaattacaatatgtttgtgcctgaatgcatttaattgtattaccaatatagtttgaagcattatataaaggcataataatacttacaagatcctctttagacatagaaactcactttctcacttattgtattcatctagctccatccccggtcactacaacacgaatcgtttcaaagaaaatcccaacatcagtcaataccccaaaatgctctatgtagtacatatcattagcaagcttttgtgctggtgtatcgtcgtaaccaccgtgaacttgagcataaccacttagaccgggtttaactaatagacgttgctcaaaaccatcaatatcttcgctgaattgttgtgtaaacattggtcgttctggtcgcggaccgatcaaactcatatcacccttgatcactgaccataattgtggcaattcatccacccgtgttttacgcataaaatgaccaacccgcgttacgcgtgggtcttctttctttgcccacattgcaccagattttttctctgcatcactatacattgatcgtaatttagttactttaaacgattggcccattagcccaacacgctcttgactatagaagcacttgcctggtgtttctaacttaactaaaatcataaaaatcagaataataattgaagctggaatcatcaatagcgttgcgaagattagatcgaataaacgcttaaatggtaaatagatgtgatgaaacggtcgatctaatttagctacaaaatcatattcatctactgtttgtgtatgactgatttggtttcccatgataagattccccttaatccgttaacgattcccaatataactttaacccagtcgtaatatcataatgcggctgatagcctaaacgtcttaattgtgtaatatctgcatatgaatgtttgatatcccctacccgttctgctttatgaataatttgtagctcccgattaataatttgttcatacacctgaattacttgattaagactagtatgtttaccgacaccaacattaaaaacttgatgtacgatgttgctacccttcgtcaatacgcataatgcttaagttgtggcctggctagttctattaattataaaatttgttagtaaacaatcaaaaatcattgtgaagtgaacctaatttattttgtttgaacagcattcagattaattttacaatctaacttaattcatctttttcagatttatcaatacgcattgcgaacatagttttttcattttgaacaacactcattattttatctcctctaaaatcaattgctatccaacacaaacataattatatttcatatatatcctttagtgtccgaaccgttttctataacccttacgcagcttttcaacattgctagtcccgataaaaactcttagaaattttcgaatcttagcctttacaaatatcaatctatatttaattctctttttaatcccctggatgtaagctgattccttaaaaacactttctgggctacttcattgaaacttattgggacttttcttcttccaataagtctttgaggactatcactaaattcagcaatctgacttccaacgaccgcaatatcctggtttttatcctcattcatataattaagcataacttccatacgttcaggattatttaaatcgtccgaatcgaaacgtccgatatactcgtaactacatgctctaagtccctctgcaagtgagattcctaaaccacagttcactggatttttcacgaaaactattttaatattccgattactacattcggatttaaaccacttcaccacttccgtcaagtttaggccaattggtccatccaatacacacacaaactcttttggaagaattgtctgagctaatatactatcaaaagcgtttcgtaataaatcaggactttccttactataaattgacatcagtcctgaataatcttctaccattaacgcgcaccatccccagtaaacacaactttgactgttcctaataacatcttaatatcgaaccaaaccgaaaaatgttcaatatagtaattatccagcttacatttatcgtctggcgtaatatcgtagccaccattaatttgtgcataccctgtaataccaggaataatacgtaaccgtttagggaaatctgaaaattgccgactaaactcctctgtcagcactggccgttctggtcgcggtcctaccaaactcatatcaccttttaaaacattccaaaattgtggtagttcgtctacccgagttttccgcatgaaccgcccgattggcgtaatccgtggatcatttttttgagcccaaaccgcacccgttcgcgcttcggcatcctgatacatcgaccgcagcttaattacattgaaactcttccccatgaggccaacccgttcttgcttataaaatgctggtcctttagaagtcagctttacaagaatggcaaacaccagaacaattggcgaactcaaaatcgtcccgattaacccaacagtaaggtcaaaaattcgttttacaaatagtttccagcccgtaactggctttccaatcatagttggaaaacgataatccgtttttggttgtacatgaccaactttaactgtttcattaatttcgacttgcttcacgttgttgcgccccttcccaatatttgctcaagcccgcttctaacgaccacttcgtcgtgtatcccaacttaattaacttaccgatgttggccaccgaacgttttacttccccttcacgccctggcgcctttttaatctgcaatgacgttcctgcaaccttctcatatgtttcaataatggcatttaagctggcttcattaccattggcgatattaaagacttcatgctcagtatcacttttcgttatcaaccataacgcttggataacatcttcaacatacacaaaatctcgtgtctgactcccatctccgtacaaggtaaatggcttcttgttattgagacaatcggtcaagatcgacagcacccctgaatatggcgaactgggattttgaccagggccataaacattgaagaaacgcacacagacagttggtaaatcataaagttcaccatatgctagtacaaaacgttccgtagcatacttatcaatcgcatatggtgataatggatcaactcgtgagtcttctttcttaggtaattctggaagattaccgtaaacagctgccgaagacgtaaataggaactgtttaattggtaaattagtcttccgaatatattccaacatattgaatactgcagtttgattcactgaatgggtttcagctggacgttcaatcgaatcggcaacactagcaacagctgctaaaaagtaaatataatcaggctgttcttcctgtagcaattgttgcatgaatttttcgttgcggacatcttcaacataaatagtgacttcatcctgatgcttaacattatgtaagtcccccatggacaagttatcaactacgacaacgtccaatccttctgcaaccaagtggtccacaaggtgggaaccaataaatcctgctcctccagttaccaatgctttcatttaactcgctccttcttctagaacaaccagtgctttcgctgttttcgtggtatttcaattccgccaatatcaatctgttcaccattcaacaaatcccgagcgttggttgcaaaacgttcaggatatttcgaattcatttcatttaatacttcgtaggccttagtcatagcaaagccccgatttttcagcgtatgcgcatctgacgcgaccacttgaaccaaaccacacttaacgaattcttttgcagttcgctgtacttgttccccaaaagcgccaactaaactcgtggccgtaacctgtgccaagaccccatcctcggccaacttgtataatcgctgcggttcggcaataatttgagcattccgttcagggtgtgcaatgaccggggtaatcccctcacaagacaattgaaaaatcatttcatccaaataacttggtaccatctcgtgaggaagttccaacagtaaatagtgtctactggcatctatgcccaacaaatcatcaacattttccatcaactgaccatttagatgtacctcttgaccaggaaaaatggttaacggaatatcatttgcatctagctctgcttgaaataccttaaccgccgcagacacatcacctgcatgattgagatagtgtcgatccatatgatgtggtgtcgctaaaatatagcgaatcccgtcagcaaccgcctgccgtgctaattccaatgacgcttctaaggaaggcgaaccatcatcaatggctggtaagatgtggcaatgtaagtcaactaaattatttaccttcatcgctgtagtacccataaccgctactatagccgtaatagccatggtgcgaaccatcgcgaacatcattcagtactgcgcccagaatattggcttgagattttttcaacgaattaacagcatcacgaaccgctgctttttgggctacaccttggcgaacaactaagaccgtgccatcaactttattagcaagcaattgtgagtcagtcaccggcaaaattggtggtgcgtcaacgatcaccaaatctaatttacgtgttgccgaagttaagaattctgtcattttgttgtttcctaacagttccgcgggattcggtggcttaggaccactcgtcatcacaaataagttatcaataacgggatgaattgcatcattcacattgtccatttgactagccaaccatgaacttaatcccttatgattttcaagcccgaacgtcatgtgaatcgttggtcgccgtaaatcagcatcgaccaataaaacttgcatcccttccttagcatattccaccgccaagttacaacttactgttgacttaccttcaccaatcatcgatgaagtcaccattaaagttcgtaaatttttgtcagtagccgcaaaattgatattggttcgaattgttttaatctgctcagtaatgaccgacgtgggttcattaatcgtcgtgagattaattggtgccgcagtcgttatattctgttctttacgtttaaacatctaacaccctcctaaactcgtttcatcgcttgtgacgatgttcgatcattatgcgtatgatagccaccattgagatttgaagcttgcttcttcattgaatggtggtgttgatgattaaccaagcctaaactcgtcaaacctagatcatcagtcaaaaattccacatcatgcactcggcgatccgtcaacatccgaattgcagcataaaaaaaacctaatagtaagcctgcgactagtcctattaacatgtttagtagtttctttggtgaaattgcactattaggtgcctcagccggtgcaacaatcgttacattgttaaccttaataattttctgaacttggttcttaaaactacgcgcaatttgattggcaattgtcgcactagcttttgcgctagcatcagtcacggcaattgagaaaacctgtgagttggtcgtgcttgtcacactcacttcacttctcaatgtgttcagtgagcgctcaatgccatagtgtttacttaattgttgctgagttggttttaaaaccacttgtccagcaattaattccttgtaggtcgtaatcatctgaacgtcagcctgctgcccagcatactcagtagcggcattagtatttttacggttaaccaaaatctggacacttgattggtacttaggtgtaattacaaagaaggtcagtcctgcggcaactatcaatcccaccaccgtaaaactgacaattgcacgccagtactcacggacaagccggataaaaaagtcaaaacttactgtttgatccataattcactctccaaaattttaacaagattaaaacacgttttaactaacgctattaaatacaatctatcatcaaatataacaccgcattggttgatttacaattgaagtccaagaagcgatctcacctattgactgcaattcaagatttttcatttaccttttgatagagggttccatgatagtctctatcatgttttttatcggccaaatggtcaatcaattttaagaatattatggtgatcatccaacataacccttatatggtaacttttaagacgctttgaatctgtttttgaaacatatgtgtgatgcctctgtggattcctgttccttagccttttttgctgctattatgagatttctcggtcctggttggattaaacttgtaatttggtagattgtaaaattaatccgaacgctgttcggacaaaaaagatcagcttcctttaaaatggtgtttaccacaaacccatcttttaggagctgatcttttgtctagtataacctattccgaacgaattaaaatcgaaaccttttgtgaactagggctgtccaatatccaaatgggcgttcggctgaaccgatcaccgtcaacaatttcttatgaattatctcgatgtcaaccttatcaggctgaattagcacaaacagatgccgaatacaagcgatcacgatgtggtcggaaaactaagctgagcgatgagttaaagcaaaaaattctcaaccatttacgtctaagctggtcaccaggaatgattgctcacgaatttaaactagctactaagtctatttataattggctaaatcaggggagaattggtttctccttgaatgatctaccggaacatggcgtacgccaacggcgtaacgttgaccaacgatccaaatataatcaatctttggggcgatcaattgaacagcgtcccatgatgattaatcaacgtaatcgtatcggcgattttgaactagatacagtcgttggtcctcgtgggcatagtaaggcagttttattaactttaatcgatcgcaaatcacggttcctttgggcataccggttaaaagatcggacgacagcgactgttaatgaagccctaactaagttcctaaccacttttaatggtccggtgcacagctttactgtggaccgtggcactgagtttagtgggctagtatcacttgaatcacaatatggtattaagacctattactgccatgcttatacgccagctgaacgtggtagtaatgaacgctttaatcggaatttacgttatttttatcctaaagggactcgttttgagcacattagtgctcaagatttaacgacgacgttactccaaattaaccagcgaccgcttaaaatactcgactggcaaacaccgtatcaggtgatgctgacaaatttgtccaaaaattcggattaaatttgcaatctaccttctgaattgtatagaaatagggaatgccttcccttatgatatttagtaaccacagaaaacatcacaggaggcattccccatgaatgaccttaccacagaaattatcgctgcactagcccaaaagcaagatttggacgaattttttcgtcaccacctcgaaattgcgattaaccagctgcttcaaaccgaattggcagag

SEQ ID NO: 23 - DNA, 16002 bp, synthetic construct
  source 1..16002: mol_type = other DNA; note = Lactobacillus plantarum PDA6 - Contig 23
gcggatccaccgagggttcaaaggactccaggacaccttggaagcatcatttatttaagttagatacatattatatgtacgaaggcatttcatttacacaagattcttgacgctacccaaattttcagtgattagttaaatgtttaagttagttatttttaatctaatttttatttaatgttgactatttacacatgttgttagtttcttctatcattaggtagtaatattttgaaaatagaaatataattaaaataagcaactattcaggagggctctaaatgaagggaattattcttgcagggggatccggtacacggctgtatccaattacacgggcgatttcaaaacaattgatcccgatttatgataagccaatgatttattatccgttatcgacgttaatgttggcaggaatccaagatattttggttatttcaacacctgttgatacaccgcggttcaaagaactgttaagcgatggtcatgatttgggcttgaatctatcctatgctgtccaagaaaagccgaacggtttagctgaagcctttattttgggtgctgatttcattggaaatgattcagtctgcctgattttaggtgataatatttattatggtggcggcttatccaagatgctccagcatgctagcgctaagccgaagggggccacggtctttggttaccatgtcaatgatccggaacggtttggtgtcgttgactttgatgaaaatatgcatgcaaagtccattgttgaaaagcctgcacacccagctagtaattatgctgtcacgggaatgtatttttatgataatcaagttgttgatattgcgaagaatattcaaccatcaccacgtggtgaattggagattacggatatcaacaaagtttacttagagcataatgagttagatgttgaactcatgggtcgtggttttgcttggcttgatactgggacccatgactcattacaagaagcaagtagttttatcgcaaccgttcaaaaacgccagaatttaaaagtggcttgcttagaagaagtggcgtatcgaatgggttatattgatgctgataaagtgtatgaattggcgcaaccattgaagaagaatgattacggtcaatacttattaagattaattgggagggcttaaattttgggcaaattaaaggtaacaacgactaagttacaagatgttaagattattgagccagcagtttttggcgacaagcgcgggttctttacggaaacatactcggatcgtgacttcaaagaagctggcattgattttgacttcattcaggataatcaatcgttatcagcggaagcgggtgttttgcggggactgcattttcaacgtggtaaggcagcgcaaactaaattaattcgcgtggtgactggtgccgtgcttgatgttattgtggacgttcgtgctggctcacctacgtacggggaatgggaaggctatattatctctgaaagtaaccaccgtcaattgttagttccccgtggctttgcccatggctttgtgacattgactgataatgttaatttcttatacaagtgtgataactactacaacgctgaagctgatggtggtattacctttatggataaagatttaaatattaactggcctattgactatgatcaagctattacttctgataaggatgccaaacaacagacctttaaaaaatttgaacagaacaatccgtttgtttacggcgaaatttaaggagacgtcatggaaaacttattagttaccggtggtgccggttttattggctctaactttgttcactatgtttataatcatcatcccgaagtcaagattacagtattagataagttaacttacgctggtaatcgggccaacttggaaggaattctaggcgaccgggttaaattagttgtgggtgacatttgtgatgcgcccttagttgatgaattaatgcaacaaactgacgcggttgtccattacgccgctgaaagccataatgataattcattgaaggatccatggccattcattgaaacgaatattattgggacttatacgctgattcaatccgcacataagtttaacaaacgcttccaccatgtttccactgatgaagtatacggtgatttaccattacgggaagatttaccgggccatggtgagggtgttggcgagaagtttacaccaactagtcggtataagccttccagcccatactcttcatctaaggccagcagtgatctcttagttcgggcttgggtgcgttcgtttggcttacaagctactatttcaaactgctcaaataattatggtccttatcaatatattgagaaatttattccacgccaaattaccaatattttaagtggtattcggccaaaattatatggtagtggtaaaaacgttcgtgactggattcacacgaacgaccattctgcggccgtttgggatattttaaccaaaggtaagattggcgagacctacctgattggtgccgatggcgaaatgaacaataaggacgtcttggaaatgattcttgaattaatgggtcagactaaagatgcttatgatgttgttaaggaccgtcccggccatgatttacgttatgcgatcgattcaactaagttgcgcacggaattaggttggcagccagagtttactgacttccggtctgggttgaaagcaacgattgattggtatactgaccatcaagactggtggcaagcagataagagcaaggttgaatcaaactacgccaagaacgggcaataatagtgtgaaatgctagaggaggaggtttctaaatgtcaaaagtaatgattgttggtgccaatggtcaattggggaatgagttgcaacgactattaaatgaacaagggattgcatttgatgcactgactaaaaaagaattggatgtcacgaacctagatgcagtcaaagctaaggttgcggaattacaacctgtggtcttatatgattgcgcagcttacacagcagttgataaggccgaagatgaaggcaaagccctcaattggctggtcaatgttgatggaacaaaaaatttagcccaagtagcagctgaacaggatgttaaattggtttatgtttctactgactatatttttgatggcaccaataaaggtgaatatttagaagatgatccagccaatcccaagaatgagtacgggcgtgctaagtgggctggtgaagaagccgttcgtcacagtggtgctgattattatattgttcggactagctgggttttcggtgaatttggacataactttgtcttcacaatgcagaatttagcgaagacacatgataagttgacagtcgttaatgatcaacttggacggccaacctggacgcgaacattagcagaatttatggttcacctagtgaaaactgaggccgcttcagggacttatcaattaagcaacgataatacagccacctggtatgactttgcaaaagaaattttgaagaacactgatgttgaagtagtaccagttacttctgaacaatttccacaaaaggcttgtcggccacggcattcagtgatgaacttgagcaaggccaaaaaaactggatttataattcctgactggaagagtgcagttgcaaagcttttatcggagtaaaggttgtgtgaccctatgcaagatagaggaaaaaatagaacatatttttatagatattagaagcaaaaggaatgatttgagttatcgctttattaaacgcctatttgatatagttgctagtatttcagcacttcttttattaacgcccgtttttctaatattaattattgcaataaaaatcagtagcccaagagaaaacgttttttatgtgcaaacacgccttggaataaatgaagcgccattcaaaatgtataagtttcgttcaatggtgtctaatgctgataaaatgttgtctcatttaaaaagtaaaaatgaagtcaaaggggcaatgtttaaaataaaagatgatccgagagtaacaaagattggccattttatgcgaaaacacagtgtagatgagttgcctcagttgttaaatgtgttaattggaaacatgagtttagttggccctagaacaccgttgccgatagaggttgcagaatatactgactatgccaaacagcgattacttgtaaaaccgggctgtaccgggctgtggcaagccacggttcgaaatagtgttgggtttgatggaatgttacgattagacttgatatacatagctaatcgtagtttgtggcttgattttgaaattataatgaagacgcttaaagtttttgtgcagccaaataacgcgtattaaaccctacttttatacgaaggcatttcatttacacaagattcttgacgctaccaactattgctaaggtgttactaattactttagtaccaagatcccaatttttgttattaagaaatccgattgatgctatttctgttaagccatataatacatggaatttagcaatatcagttttacttatggcagttattataatacttgcagataatattttggttattgcttggtcttttgttttatcagatagcttactttttattttaagtttgattacttggcataaattagttaataaggaattaaaggaaaatttaaatgtatagaaaaataatgataattacattggtttatggaaattatagtgatttgagtagatttgttaaatccattcccttcaggtgtgaagattttaaattagttatagttgatagttttaaggataataatactaaaaatattggtttaaactttagtaaaagcgttgatgctgattttatttctgtcgacaataatggttacggttctgggaacaatgctgggataaagtatgcattagataattatgaatttgactatctaattattactaatccggatgtggaaattgagaagattgacttatacgatgttaaagatgatgtggtaatggggccacaagtaattaatttaaatgagaaaaatcaaaatcctcattattacaaaaaagagagactaggctttctagtaatgcgacactatgtggtaagtgaaaacgctttttggttatatttgtatttagttattaataaaatatccaagtttttttggaagacttattttactatttttgataaaaaaataaaattaaacgtctacgcgttacatggaagttttttttctatgacaaaaagaactgctaaaaaattagttccattatttaatgaagagatgtttctgtatgcagaggaaaaccatttagcagaattatcaaaacgaaaggctgttacaatgatttataattccaattggattgttaaacactttgaagatggaagtggggcaagtgatagtcaatttactcgagaaaatactctaaaatcgttacgtgttttttttaaaacctggaaataactacttagtatttaattatggaggttaatttgataacaattcagtttatttcaaaaattagaggattttttaatcatttaattaagcaaaaatttaatgatattaggtttgtaagtgccaataaaacatatgaagctgtgagctggaagcataagcttcagtcacgtttaattaggagtaaactagcagattttctggggattattcaaattttaaaattaacaaatagtgactttgatattgcaggtagttttaatagatttgttttaggggataagccatactttatttatcttgagaatccaactgccctttatcactacaaattggaaagaaataaaacttttctcggtaagcggaagtttattaattctatgagaaataataaattgaagtctattatatgtatgtcgaaagcttgtttttatgaagagaaatctatagtagaaagagtcaataactcagtttcggtcaaagtaatatatcctctggttccaagcaatgactatgtgaatagtgattttattagtaaacggagttattcaaaaaagttaaaacttttgtttgtgacacaaggctcaagatttgtttctaaatctggtccagaaacagtacaagttatgcaaaaattaaaggatattaatgtagagctaacaattctaacagagcgaaaggatatcccgaaggaaacgttaaagttgattgaaggctcgtctaatatcaacctattagagtttggactctctttctatgaaatgcagaaactttatgcggaatcgcatatacttgttcatttaacaagtgatgatagttttggggtaactttgctggaggctatgaaggctggattactaattatatcgactaatttatatgcaattcctgagatggttacagataattataacggatttttacatgatcctaaatggtggtttttttcggcggataatacgcctaatccgaatatttggaatcatcgaaaaaagacattatataacactgatattatagatcatgaactaattgattttgcagtcaaacatattaggaaattatataaaaatagggatttattggctaaaatgtctaataactctctgaaacgcagtagtgatgaaccgttctcagacatatatattaagcaacagtgggaaaatgaaatgattaatatcatgaaaaggagttaaataaattgaaaataacagtagcgggcacaggttatgtgggtttatcgttagcagttttattatctcagtataatacagttacagcacttgatgtagtaccagaaaaagtagatttaatcaataataaaaagtcaccaattgttgatgattatatttctaaatacttagatgagaaagagctgaatttagaagctactttagattataaactagcattacaggatgccgattatgttattatttcaacgccgactaattatgattcagaaaagaattattttgatacatctagtgtagacgatattttagaaaaagttaccagaattaatcctgatgcagttgtcattgttaaatcaacaattcctgttggctttactgaagaagcgcgcactcgttttaataataataatattatctttgctcctgaattcttacgtgaaggtaaggctctttatgataatctatacccttcacgtattattgttggcgaagattctgagcgcggtcatgtgtttgctgggttgttgcaagaggctgctatcaaagaaaatattccaactttatttgtatctagttcggaagccgaatctattaaattattctcaaacacatacttagcaatgcgcgttgcattctttaatgaattagatacgtatgctgaagttcgtggtttggatactaaacagatcattgatggtgttggtctagatccgcgaatcggtgatcattataataatccttcatttggctatggcggttactgtctaccaaaggatactaaacagttattggctaattatgacgatgttcctaataatctgattcaagctatcgttgatgcgaatgcaacacgtaaggattttattgccaatcaagtattagctcgtaatcctaaaaaggttggtatttatcgtttaacaatgaagtctaattctgataattttaggcagtcatcaattcaaggaataatgaagcgaattaaggctaaggggattgaggttatcgtttacgagccaactttaaaagatagtagattctacaattcggcagtggttaatgatttagattcttttaaaaaagaggcagatattatcgtggctaatcgtaatgcagatgaattgtctgatgtaatagataaagtctatacgcgtgatttgtataatatggaataacatattttatggtctcttagcgaagtaaaaccgaggagaaactcatgaacgttttaaaaacaaacttacaagatgtccgcatcgttgaaaccgatgtgttcggcgattaccgcggctttttcacggaaacttacaccaaaaataaatttattgcggcggggatcgacaacaacttcacccaagataatcaatccttgtcggtcgaacctggcgtgttgcgcgggatgcattaccaattagcgccttatgcgcaaactaagttattgcgcgctattacaggggtgatctatgacgttttagtggatgtccgtaaaggttcaccaacatacggccggtactatcccctgtcaagttgacacttataaaaacgaaaacacaatttttcttatccgaccaaatcgtggtaatattccgccacggtttggtcatttcttttagcggaaatgaactgattcgtgaagtacattattccagcacgaacctgttcctgtaactctgctagagtttgcgcctttggacgatgctcgagccagatgcttttaaaatctgcccaccagagttccattacggcgttatccgctggtgtcccaggcgccgataaccttctcctgacggagagcttcgttgtaattggtggacgtatatgccgctccacgatccgtatggatcatttctggagtggttccactagccttagcggcttggttaaagactttgattgccgcttcacctcccggttgcttatttcgatcaatttttttgagaaggcaatctgaacctctctttcacgtaatttagctttgaggtcccgaatctctttgagtaactgttcctcacggtcggctggttgcctacccctggtcttgccacgccggtcctttagggccgtccaatcgtttgcttgctcgtatttctgcgtccaggcatacgctatggaataggtaatatcaaacttttgcgctgcttgcttgtagtcatgattatgcttcaagacccatttaacgatttcgattttctcgtcatacgagacctttcgtcccatcttccgcacccgctttcttactggttctttaccattattgtaaaggatgacccagttacgaagttgggataatccacggatatcatactttaataggatttctttggtaggaagacggtgatttcgataatcacggacggcacgaagcttaagcttcttagggtaccggcgattgtgtactgggcgctctaaattagccaatctgccagttagatactgctggatccaacgctttaaactccctgcacctacattgtgataatcagcgaatggattgaagtcaatatttgagacagattttaagagacattcagaaccgcgtttaccttccacagctcaaataaatcattaatcgcgattaataacttatttgaaccctggaaagcattaaatcaggcggccatttggctcgtaagtgttgcaatttcaacttgtaagggggtctggtagcccagtgaactatgaattctcttcctattgtagaaagcatgcacatattcaaaaaggacggcagcggcagtttcataatcttcaaagactggcactggataaacacattcctttttgagggaagcgtgaaaggattccattggcgcattatcatacggacaacccttacggctgtatgagtggcggatatgtagttcagttaaacgttgattgtaatcatcgctggtatactgtgatcctaaatccgtatggataatcaggtccccagtaatggttcgatttttaaccgcgctttcaagggtctttaagactaaatcagtagccatcttttttgagaacgaatagccgataatccgtcgtgagtgcaggtccatgatggttgataagtaacaccagccatcacgcttcgtttgaatataggtcatatcagcggtccatttttgatttaaaccagtggtcgagaaatcctgcttaagcaagttgggacgctgttcaaccttggttttggaagccgaagccgctttccacttattgacggtaacggagtggatatccagttccttcatgagccgggaaatccgtcgtggactgcaccgaagctgcagtggttgaagttccagattcaattcatggtggatcttcataacaccgtatcgctgcttaaattccgcaaagattcgcagaatccgttgtttcaagcccgcatcttcggcccggcgttttgaaggtttgggggatcgataacgataatactgagctctggaaacaccgaggattcggcacatcttggttacctggtggtgatggctttcttggtgaatgtaatcaaagatattggttacttctgcgcaaggaagcccagggctttttttaggatttcgttctcctcagacagcgaagccagtcgcttttccatcgctttgatttcgtctggcgatttaccggattgagttttggcctggccctggatccacttatgaacggttgaatagccaatgccatattctctggccagttgggcagctgattcgccttgcttatataggttgataatgttttgtttgaattctttgtcgtaacgagttggcatgtaaaaattccttccttttgagagatgatttattcattataccctctcttaaaagttgtctcaggaatcagcttacatccatttttgtccgaacagcgttcggattaattttacaatctaccgtttactaacaaattttataattaatagaactagccaggccacaacttaacagttgtggcctgttttttgatgctgtataattaaagggttagaaccgtgtcattacttaatgacataaacaaggagagaaaaagatgaaatatggctatgcgcgggtcagtaccactgatcaaaaattagcaaatcaaattgagttactaaaattggcaggagcagaaaaaatctttcaagaaaagtttaccggcacaactactgaacgaccggagtttcaaaaactgttgcgcgttctaaaaacaggcgatactttgattgttactaagttggatcggtttgcacggaacacgcgcgaggccttagccattatccaagagttgtttaaagaaaatgtcaaagtcaacattttgaatatgggcttaattgacaatacgccgactggccaactagtctttacaatatttagcgcctttgcgcagtttgaacgcgatatgattgtcacgcgcacacaagaaggtaaattgtatgccaagcaacatgatccgttgtttcgggaagggcgaccgaaaacgtattctgatgaacagatcagatttgcttatgagttgcgaaaacaaggcatgacttataagatgattgaacgaaagacggggattagtaaacgcacgcaacagcgaaggtttaagtcgatttaatttaagaattgaatgtttaattaatcacgtacgacggggattgccgctttattaaacagttgtgagagaagtttatttagggattttaggcactatttatacctgttgtgctattgaggttagttgtgataaggattaatttgtactacaaaaggcctactcaattgttagttgagcaggccttttgtgggtattttgattagaggtattaaccctatgctaattataaggcttagctttcaaatggaacatactattatccaaattatgatttgttaaggtggtgttgtcatagggtacaaatttgtccaaaaattcggattaaatttgcaatctaccaattgaatagggccaaacctctttttcactcgcaaattgatgaaaaatctgattaatttgcaaattgcgttgaatatagagattcatgcgcggcggcacgacccagagtctagggtcattgggcaagtcacgtttgcgtgagacattggctttaagatgaaataactgcttagcctcgggtgaagtggctaagatgagcccaccattggtgtttttagcttcactaagaacgactagtgggacttttaaaggattaagcccgcgggcaacggcttcacaacttgcataaaaggacttgttatcaattaaaaagaacacgccatgcggttcttgatcaaaaaacataagctcaccttctcaataatttacagttattttaccacaaaagggaacatatgttcacgaaagcgatataataaatacataaaatgtatgggcaggtcgtcgagaacttgtatggaaaactgcatactcaagtgaaagctaatcgatttactccagcagagaagtgggttaaatttatcaaagaaaatgaggtccttgacggtatggaagagtccatgattgagttggagttttagggaaacacattgagattaaacgccaaagatacaaaagtaccatactactttagtactgtgaatattaattatgggtggaaaaaaagccactttttaaagtgacttttttaacaagtaacaagtaacaagtaacaagtaacaagtaacaagtaacaagtaacttgttacttgttactaagccctaaagcacttatcccagcttctagaatagtgtccaatacatctactttagtttttttctgtttatacgcaacttcatttatgagttcatacttgctctctttgactctaagaggttttgttttttcttctttagcaaatgggcttgttttactttccagcctttcttttgcatgaatctgattgagaagacttttcttttcaggcatttttatttctccattcgtgtcaatgcttcatctaaaactactttgtacatgtgcagtactcgcttgtcccaaaggtcattatttttaataccacttctaccaaatcttttaacgcgttctctttgatagatattttcatggaacaatgctgggccaagtgattctgaagcgtctttgataatttcttgatcaacgcgaccgtctatcttcacaagatattgaattatgccaagtaaatcgaagtgtgattcgtactcggtcaagtcttgaagatagctaataaattttaatgtactagaatatgcttgttcctgtgtttgcagtacacctataatgtaatccgaagctaaaacagcgttattgacaaagtttgataaagttggtggtatatcgattaaaacaaagtcataatcattctttatattacttagaagtttatcaagaaggtatttacgctcatcttttctatactcttctagcatatctgggaatgcggatagtgaccaatcactgactaacatatcaaagtagtcagtaaattttgtcacagactgagacaggtcaaataattttagtccattcataaattcatttttgggtttgctaatgatctttgggtatgttttcttcataatttcactagcgttaccttgaggatcaaaatctactaataatacttttcttttagtttcagctaataaataggaaaaaagacaactagttgtagtttttccaaccccacccttgaaattaccgattgttattactttagtcatgaagccacctctttcaataacctaaatataatacaaaaaggcgattttgtaaacatatttttgtaacaagttacttgtaacatgtaacaagtaacttgttacaaaaacagtgatatttcttttgtattaaggttgctttaatttgtaactatgttatatttaggttaacaaaaaagagcgtcgatcaaggagttatttccagtaactctctgatcagcaaaccaagtaccgggatacttgatcgcctttaacgctcgtctttatagatggcaagctaggatatgaactactaaaagtagtcaactctagttgcctgataggaatattatactaaacctattaggaatatgccagtcgaaaagtcgagttaaacgcatacataggtttagttaaagcagattaagttatcccagtgggcggcttaatctgctttttgtgtagttaagtctagagggagaagtgctccatgtttgttgaaacctgttaagctaatcccaattaaaaattaaataaacaaaaaatccccgtggggctaatcacgggaactcatagaactatcaacgaatgagttaattgtactcgtaccagttacgtttggcaagaatgcagtttgatgaatttgaccgccctaagagccaagttggggtttaaataccaagtagccacgttaactggagcgattgcttaaaaatctagtgtttgaacttttaattctaatacataaaaatgatgactgagaacgctacggcgttcttttttagtagggggtgagcacagtatgtcagcgatgaaaacagcacaacaagcgattgatttgattttgcatcaaggattacgggaaactaaagcccagcatagtaacgtcttgaagttagaaaaaacgattccggggaagcaaaataagcaaggtgcgattgccatgtatcgcagtaaagcccaaatgtcgaaaagctgggggacgatttatacctccaaagaagcagtctatgataactatactaacagcacgcattggacgcccaatgtttttaattatcttacctatacagatgcgactaagcattatgtaaaaggggctaaggaacaaaatttaagtcagatcaatacgttagtggttgacgttgactaccgtgatgttgaggagcgccaagcgaagtttgccgaggtttgggacacggcaatgttagacgtacagtttctcccaaccttaattttggcgactaccaagggctatcatatctattatgtctttgatgagccagtgttcgtccgtcgtcacgctaatggaaaattgccggcagtgcgtgcggctaaagcgattgctaagtcattaaagcaatactacgcgcaaaaattgccggcggttgatgtgacttgcaacagctttggtattttcagagtcccgcggccagacaatattgaatactttgagcctaaaatgacggttgacttccaagctttaatgacttggagtattaattttgcgaatgatcagcaccaaattaaggctcaaactattcaacggtcttttaaggctcggcggactagtcgccagattgaccaaccgtggtttcaagccttaattaaccaaacggacattgatcaaaacgtgggctatggtcggcacaatacaatcttcacgctggccttagcttgctattcctcaaatgtctcgcaagcccagtgttttgatattttggacgaatttaacagcaatcttaatcacccgctggcgacacagcacgttcaaaaagtaattaatgatgcttattcaggtcagtttcatgcggccagccgtgaatatgtgaatgcgttgctagaaatttgggttcccgatgctgacaggcgggtttatttgcagcgttcgcaaacgacctggtacaagtatgcgaagccgcgcacagaacgcgttaatagtcacgttcatgaatggcaagctgatctcatggcttactttaaccaaagaatttcccaggacaataattggtttaccaaaacatctttacggcacatttctaaaggattaaatatttgcttaggtagtctaaccaaagccctgaataaattgattgaccagggcttagtttatcgtgaaaaaggacatggtcgtcaagcaaccatgtttgcgacccggagtagcctattgcaacatgcgatgagtttacaacgccaacagcgattaaactattggctaacggtggctcggttattagaaccttcagaagaattagtggcgttacaacaactgagccttgatgctcgccaagaccatcaccgcaatgcccaattgagcttgctagatacgggttaaaatttagtgttctaaaatgccattacgtatctatagttctgtacacggttttcttggttggggattgagtaggtatggtgggctagactagggtgttatttaaattctagttgtcccgtcgcctccaaaccgttgagaaatcgccgcgttcggcaggcatactattcttaaccgatcttctcgacccaggcggtttttaagccggaaatttcggccaatactatttgatggtgagtagtgttgctcgcttttgatgagcagtagttaagctaactgtaaattgaaagtgagagggggttgattatgagaacgtgtttggatactttgacattcgatttgattttagttaaattagatcaaaaacaggagtttttaatccatgaaaagctttgcacaccattatagtagcgacatc

SEQ ID NO: 24 - DNA, 15729 bp, synthetic construct
  source 1..15729: mol_type = other DNA; note = Lactobacillus plantarum PDA6 -Contig 24
cgctccctgcgagggtaggacgttgccatgcgattattccgacatagctcagttggtagagcgcttgactgttaatcaagatgtcgacggttcgagcccgcctgtcggagttatctacggtaagccatggagagttgtccgagtggctgaaggagcagcattggaaatgctgtaaacgggttatacctgtttcaagggttcgaatcccttactctccgttagttagatataataaatatgaccccttggtcaagtggtttaagacactgccctttcacggcagtaacatgggttcgaatcccgtaggggtcattatggaggattagctcagttgggagagcgtctgccttacaagcagagggtcacaggttcgagccctgtatcctccatctgatgagagttactcatcaataatttaatagactccatcatgaagaatgatatggctcggtagctcagtcggtagagcaatggattgaagctccatgtgtcggcggttcgattccgtcccgcgccatttatggaggggtagcgaagtctggctaaacgcggcggactgtaaatccgctccttcgggttcggtggttcgaatccactcccctccattctttatagggatatagtttaatggtagaacaacggtctccaaaaccgtcggtgtgggttcaactcctactatccctgccatgatggcggtagtggcgaagtggttaacgcaccggattgtggctccggcacgcgtgggttcgattcccacctaccgccctttgattgggttatagccaagtggtaaggcaatggactttgactccatcatgcgctggttcgaatccagctaacccagttgggtttgggcaataaatgatggcggtatagccaagtggtaaggcagaggtctgcaaaaccttcatcaccggttcaaatccggttaccgcctttcctgaaaaggttataatcctgatcagatttatgttccatctagttattattttgccggcgtggcggaattggcagacgcgctggactcaaaatccagttcccgttgagggagtatcggttcgaccccgatcgccggtactaagaggttttcaggaagctctaagtacctttaagaagtcgttatatcgttgatataacggcttttttgtattcttagaatcatgcgaaaataggcaaaatgatttttgggtgaactttccaattgcaaagaataaatttacaatattagcattgcatgaatatgaacgtagaaatagtctcgtaagcatcgaaaagccctgtattagcataaatcatgctaacatagggcttttcatattatggtaggtctttaaaatgaatcaattcatctaaaacttgctcgttgcactcggtgataactgaaatagttggtttaagtccatggtgcttgttctgctttgtgactcgctagtgagttgtaatgtgtttctgaatcgcagctagtcaaataacggtaacggtgccaaaaaatcgatatctgttcgttcgctggcggcgccttctgctaaaattgctatctgcttgaccacttgggcgccagcttggtgtaggagggcgttggcagctgtcaacgaacccccactgctaatgacgtcgtcgataatgataacgcgcttatgattgattagtgcggcgtcagtaccgtctaaaactagctgttgtggggtgctggtcgtaattgcgcttaccggttcgataagcgggtgctgcatgtaatccttacgattcttacgtaaaacgataaagcgagggtggtttgtggcctggcttagtgcctgggctagcggaatgcccttactttccatcgtgactaaataatcaaatttagtggtagttagccgttgactgagctgacgggcagcatagtcggtcagctcagcgtcgcccaatagaacgaaagaggcgatgctagtcgtggcatttaatcgaatcaatggtaactgccgtgtcagcgatcctaatgttaactgataagtttgcatatttataaccccaatccaattaatggtaaaccaaattttaggagtgccccggtcattagccccgcgaatggatcgacaagggcggtcacgacgagcgttacgcctgcaaccgtacttgacgagccgtgcaaagcggtggttgcattttccgggaaaatgacaatggtccctaagataaacaaaaaaccggcgattgcagtgctaggcacaacttttcccagctttggcagccatcccagtaatagaatcagcatcatgatcaacatcattaggatacccgcgattactggttcaggcgcgctggctgtcgcggaaataatcgtttctactggcgcaccacccagaaggctagttcccaggtctgctaatgcctggctactagtcagtagatttagattgaccgggttggggtgttgtcccgtcatttggccagtaattaagccgtacgagaggttagcaccgatattaagacaagctagactcagagcacctcgcaggattttaaaactgaactgtggtctgacaaattgtaatttgcgggtcgtcacgtgttccggtagtgcgacgcgataatgtgtcgtcgctgcgtaacagctggttccaatcactgatacggcaattgtccatactaaatctttactgatcaaataagtcacacccgccaagccgattgacagccacccaaattggggttgttcgtgcgccatttgcaacgcgattttagccaacatcaggccaactcctgccatcatcgctgccataagctgattgcccagactatgaacgatgagcggcagagtaccggtcaagccaatcacgaacatcatactcgcacctaaaaagataatcgacgaccgttcgcgtaaatcgtgtcccaggtgcccgactagtgcgagggattccgcttgaaatgaaaccggtgcaactgaactagccacgccgttgattaaaccaactaatccgaatgaaaatgcagtcggaaagaccgcaaaaccgagactcatcgccataattccttgtgggatcccgtttaaaacgaccccgattgctgccaatagatccgccaaccaatgcatattaataccgccttttttgtttatacgaataatatacgactgattagggtttgaatccagtaaatttaggataaaatcagaataatattgtttgttaactatttatagttcgtgtttttgcaaatcacgattagttggcgcacgctcgcaaatggggtatacttagtgctaattagtgaaggaggggtggcaccatgccaacgattaaagattattacttgccaaagcggccaacattattattttcgttgcatccagaaccaacacaagcgattatcaatggcaccaagattctggaatatcgtcggcgtttttttgcacgtccgtttcaagcatttgtctatacgacaggggctaatgggggaattcaactctttttgcgttgtgagcagggcatgcaactcgtgcctgaacaattagcgcttgtgggcgcattgttacagcataacgcgcccacaaccaccgcggcttattttgaaggcgctaaagtcggattggcgttaccgattacggcttttacaaccttacctaacattccgttggcacagttacgtcgtcagtttgaaaactttgttacgccgcggagttacgtcttcttagatcagcctgaccggcaagcacagttggattggctattaacgcaaccctgtgagtcgctaactattttggactggcgcaaacggtatgcagcactggcgactttgttacaaaaatgaagccaagcttgtcttaatcgggctgcaactagtgcgccggttataagaatcaaacagccactcgttgtgtatttgctgagcaaaaggacttagctgtgacaactgccgcaaacgagtagtcatttagcatgactgattggatttgatcgtaaaaaaagaacctgccacaagtggtcaggttctcagattaattagagcattttttcatagacgtagcaaacgtcatcgacatggtatacaccgaccatttcgccaactcgcttgaagttcatctttgcaatcagatgttgcatcgcttgattgtcggcatgagtatcgatacggatgctcttgatttcaggatgatccgcagcaatatgagcaatgattttttcgaataattgagtggcataaccatgacctgcatggctagaatgaatcgcgactcggtgaatcacgacgtaaggtgccgtggtatttaaccattcggccttcgcagtatcgtaagtttcgtctggtgaaggcacgacagcgacagcgccgaccgttgcgttgtcgtcggcattgaataagtatgctgatccttgcatgatgtcggccgtgatttgtttgcgagacgggtagtcgccttgccactggttgaccccagcttcagcaagttgattacggccgtcactcagaatgtcgatgatcgtatcgagatcatcgagggtcgcttttttaaagtacataattctagctcctctcttgaacagcgattgactgccgaagcagtaatcgacttttaaaagtatacagaatttttagaaaaatgaaactattttctaccgattcttaggagattttcagtgacgattttcaagtaaaatcttgcgcgcttctcgggccatgtcatgttgcgtattataagcagcgaccgcactcggtgcatattggtaagtattagtccgcaaagtttgttcatagaattcgaagtagggtaagtgggtattttgcgcaatcgtgatagcacgctgccaatcgaaatctacggcgcggtaatcaacatgctggaggccagtctcatcaattgtcagaagcaagtagtttgctcgtggttggcgtaggtggggattaatggcagtcggaagaccaactgtcccggcgtttagaatcaactgtcccgtggttgcgtagcgcatgatgggctggtgtgtgtgcgcgtagatgacgatatcgacatcgccttcagcggcttggtcaaagttggcctgactggcagttggtgcgagcgcgtgtccactagcgacggtcggtaaaacgtgttggagacggatggttaacgggccgacgtgtttgatgactgtcattggtaagttcagtaaccgttcaaagtgtgtcgaactcagctggcgccgatcaaaagcggtgagaaccgttgccataatttgtttgggtttagtaaacgtgttgggattggctgccattactttttggtagttttcctcgtgatttccgagaacgtaggcggtggggtgaacgcggtctagtaaggtgagacagcgctccgattctggcccgcgaacggtcatgtcgcctactgtccagtattcgtcaacgtgttgtttctgggcgtctgctaagactgcttcgagtgcagtagcgttaccgtgaacgtcagataggactgcaatttttaccatgttgagatgcttcctttctactatgtaatctaaactctggtgagatgttttattctggtaaacgtgggttttaaaaatttatgaatgtaaccactatgaaaagccatcgtaacttttatctgttataatgggtatgaaacgaagtaatatatagcacgtatattcaagccaattcgtttcgtgccgtggttatccttgcgataatcacggtttttattttaccatagtgttattaagtgtctggttaataattgtcaattcagatgtttatttttgcaagttctaggtatttgaataatagcatgttaaacggatgaatgggtgccagcactaatcgctaaggaggtagcgtacttgtcaacaagatttcaacatgaaatagtcacgcgtacacagcccttatcagcttgggttcacttgcacgattctaaggcgccacagcgaattgcgccacactggcatcaaggtatcgaactttcgtatacgctcagtggtcacattgacgattttacaatcaatggtcgagattatcagtctaaatcagggtcaatattagttgtgaattcacaactaattcatagcgttcgaacgatcaatacagcaaatagttgtgcgttatcaataatctatccgtacgattatgtgcatcgactttatccgtccattgagcatgaagtaatcgcgattaacgaaccagcgtatttttcagagcagcagtcggcggtatacctagatttacagggagatttatatcaactagcactcgcgttacaacagtcaactgcgtatacgaacctacgaattgaggcgctaacaactgcaatcctccaacgcttattgatctattttacgacggctaaggcaagttctggtgtgatttatgggaaagcacctcagattgttgagcgaattcaaaaaattaccatgtacgtcaatcaacattatacacagccaattagcttatcagacatcgcgcaacagattaatgtgaccaaggaatatttgacgcgcttttttaagcaacatatggagatgacggtaggagaatatattagtttggtgcgtgcccaacatgcctatgaagatctgctaggtcagcgtggaaatttgaccgcaattgcgacgatgaacggttttccaagtacgcgtgccctaaatcatgcttttcaagcggtgtatcatcaaactgcagcgacaatttacaaaactgaacatacattagactaactgtttatggacgatgttctgaaagaggtttagattctgctactaactggttgatattgctatattaatcggctagtagtttttttatgatagagccaataaatggaggcgcttacaatgatatcaaaagaattgagtcggtcaataattgaattgcgaaccgcatttaagaaaaatgatgatgcgcgtgacgctgggttacctcgtgaaatggctggtgtcgagagattagataatctaagttatggtcctgaccccaagtggcatttgttggatttatatcggcctactaaggtcattaaaccattgcctgtgattatcaatattcacggtggtggatggtgttatggcactaaagaaacttatcaattttatggtctgaattgggcccaacgaggatttgccttcgttaaccctaactatcgtttggccccagatgtgacttttccaggtgaattggatgatgtagatcgttatattcattgggtagcggaacatgcagccgaatataacctagacagtaataatgttttcttgattggtgacagtgcaggtggtgagatggccgagcagtatgcaacgattctgactaatccggaatatcggtccaagtttggttacgagctaactaatctgaaatttcgcgcagtcgtgctcaatagtgcggcggcatttccgctagacgaaggcatggtgacaggtgcagttgctgcatactttactcccagcatcatccgtcaacaacgagaacagattatggcagaaaactacattcagaaaaattatctgccaacattcatttgtacggcgacagcggactttttgcgtaataacgcggctaagctcgatggattcttaactgccaagaaagttgaacacgtttttaaaatgtatggtgatgacgatcatcctcgcgggcatgtttttctgattagtcaaaaggatgaattagcacaacaagcgacggatgatgaaatgcgctttttgcaggaacatatggcctgatctaatctggaggaaaatatgatgaaggacaaacaaaatcatttattgtttaaagtttcattattatcaatttcattatttttgatgatggcgccgcaaatttcttcggcgctaccgttgatgtaccatgctttcccgggaattcaacaggccggtgttcagacgcttgcaacgattcctaattttggaattgtggcggggctgcttgtcagtccgttgatggtccgctggtgtcatgaaaaactaaccattgttattggcctggttgtcaccctattggcagggacctttccaatgtacgccacggcctacagtgcaatcttagtttcccgttttctaatcggtgctgggattgggctattcaactcactggctgttagtttgattccacaattctataagcgtgatgaaaatgagttggcgcaaatgattggctatcagaacgtgatgggaagtgttggggccgccattgcctcattcttagttagttatttagtaacgatcagttggcatgccgcctttgccatttacctactcgttattcccgcgttgattttatttacattgtttgtgccgttaccacggccagttatacaggcagctagccaatccaaaaaggcagcgacagtcacacgaaaaatcaatatgccagtcgtggtaattgcagtgttgatgtttttagtctttatgttctacatgccgttttcttatgaattaccaagcttgatcgtcgcaaacggtatggggaccagtagtacggctgccttgattgctggattatcaacattggtcagtattccagtgggcgctagttttggcttcttctttaaacgattacatgatcgtattttcccgttgggttttttgctagttgctgtgggcttcattctgattgcagttgcaactaatattgtttttttattcgttgcggttgtgattctgggctttggttttggtatcggtgtcccatacttatacaattggttggactgggcggccccggaatcatccttgaacttggcaacgacgattgtgttagtgttggtcaatattggttgctttgtctcaccaaccattatggatgtgctggctaatatagttggtcatggcacgccccggggagttatgatgttgagtggcgttgcctttctacttatagctgcctatgcgctcggacattatctacatgttcatcaagcgcaggctaacattacgggtggtacgcatgattaataattatttatgtcttgatattggtggtactagcctcaagtcgggactgatagatgcgaatggtcaattgcagcagtcacttgatgcagtgccaattgccaaaaataagcatgatttttggcaccagttaacagcaactatcgaccgctttcaagggcgctttgcgggaatggcaatcagcgttccgggtcaagtagacccccaacgcggtatcattcaccatggcggcgcactaccatacctggatcaatgcaacttacaggaatctttggaaaaccattatcaggttccagtagcggttgaaaatgatggtaaggcggcggctttagccgaaaaatggcgcggaacattacaatattgccaaaatggtttagtcttagtgcttggaactggggttggtggtggcttaatcattaataatcagctctatcgaggtagtcattttcaagctggtgagttgagtctgatgttagccgcaacgactggaactaatttcaaaataacgggtgagacgggttctgcagtgaaaatgattacggcaattgcgcaccaattacagttacctgatcgacatgatggtcatcaggtgtttgccgcgatagctgacggcaacccggatgctgaacgcatctttgaagcttatggtatggaggtcgcacaaattatcttaaacgttcaagcagtactggatgtaatgaccgtcgcaatcggtggtggcatcagtgctcaaccgagtgttgtgcccatgatccgtaaacagtatgcggcgctgctgcaacagtatcctgtaattggaacgactttatcaaagccagagattgtgcctgctaagtttcataatcaggccaacatgattggtgctttagcgggactgctgaatcgctgaatatgactgactggcattgtttgtgcaactgtcttcttcaaaagttctgtcagtttttagcaaagtaaaagataaggacctcattttgaatctatcagaatggggtccttattgaaataacggggattagattgccaatatattgcataatctcaaaacaagctatacaccaaataaatattcaacaccgtaataattccggccagtccatatcccacccacgttaccgccgggcgattaacgtgggccttcatcaggctggcgtcatttgtcagcgcaactagtggcaacaaggtaaaggggagggcgatgctgagtgccacttgcgcgtaaatgatcaagttttcaaaggcagtgtcactaaagccgactaacataccgataatcagaatcggaattagcgtgacagcgcgagtaagcagccggcgttgccatagcggtaagcggatgtgtaaataaccttccatgacgatctgaccagctaaggtgctagtgatggatgaaattaggccggtaattagtagggctaatgcaaataaccagctcatgaccgggctagcaagggcgccaaccacggtggtactttttaacccatcgaagacggcctgcagactcgctaacgcgttggtgtgaccgaagaaaagcgtcccaccaaggacgagcaaaagtgcgttgatgagaaaagccgcaatcaagtgcactgttgagtcccaattggcgaagcgcagtgcttctgtgacttgggctggattatgataatcataacgccggctttgtgcaagcgatgagtgtaagtataagttatgtggcatgatggttgcgcccaagattccgagactgaggactagtgcggtatgatttttgacgatcaatggtgttggaactaagccgagcaacacgttgccaaattgaacgtgggcccgtcccacctcgataccaaaaataatgccgacggtcaaaatagcgacgaggacgattacttcgacacgccgaatgccaaatctcaaaaacaacaagacaactaagacgtccgcaatcgtcagtaaaattcctgcaagtagtggtaagccgaataacatttttaaggcgattgcggttccaattacgcccgtcatatcagtcgccatcatcgcgacttcgtttaaaatccacgcggcgtaacgcacgggccggggcagcttgctagcgatggcttgtgctaagtcttgccgggctacaacgcctagcctgattgccaggccttgcatgaacatggcgacaatgatggctaatgcgagcacggctaaaagccggtactgaaactgaccgccaccggctagggatgtcaaccagttgccgggatccatatagccgactgccactagtgcaccgggaccgctataggctaaaaatttgcgccaaaaggccgtctgatgaacgtcgggaaccgcgacgctctgattgatttcttcaagactttgatgacgatgcgattgcatggttcgacgcctcctgcttttggatagcgaggtcagccagaaattggctgaagccggtatccttattcatcggtggtactaagtcaaaccgatcaccaccgcttgcccgaaaggtttgataattttgaacgtagtcttcctcgagggtttccaagcagtccacgacaaaggatggcgtaactactaatatgttgcgtttgccaagttcgaccaactgcatgagctcattttttaagtaaggcttcaaccacggcatcggtccgaacttggactgatacgccgtaatgaccttatcagctggtaattctggtcgctccgccaacacagctttggtcgttgcctcgcattcgcgttgatagggatcaccatggcggaccattgcagtgggaatgctgtggtagctgaagatgaccgcatcgtaatgatgcgcctgatagctttgccagactttggttgctagtaagtgaatataggtcggttggtcgtagaaactgtcgataaagatgtgtggtaatccagttgcttcaacttgacgatggatgccgccgtgcgtgctctgggtgtattgcggaaaaagtggtaaaataattggcttttcacacccatcagcaaccatggctttcaaggtcgcaccgatatcgggttgaccgtacgtcattgctagtcggacgtcccaatcgggtaatgctgcttgtacttgttggcagatggcttgactgtagacgattaatggtgagccttgtgggagccaactatcctgataaaaggtggccgaacgccaagaacgggtcggtaagataataccacgcaacagcggttgccagagtgcggctggcatctcgatgacgcttggatcacttaagaattcttgtaagtatgttttgacatccttagtccgtggggatgctggggagcctaaattgacgagtaataatcctgggtgcatagaaacccctccaatgctcttgataaattaatcatagcataatcgtcagcttgtatacggggttaatggtttatttattcgattatctagtgataatcaatttactgctgaaataaataaaatctcttgctagcaactggccgggctagcaagagatctgaaattgatatttggttttgttgcagttcaaaaatcggtgtcgtcggctggatcgtactttaaaagtagattcagaaatgccagcaaaagccatgaccatgttcgtttttaggtcgtcaacatcaaaaggcgattactgggtggacttggtgagttgagctgactaatgggcttactttgcggcgtgggtccgtcgataacgttgattgagatagtagcctagatagcaaatcgccacgaagggaatggtgtaatacaaggcaatccgctggttagggtcaaaccaaatcaagatacaagagagcccacttaagataaaggccagccacgggacgaccgggtagccgggcgttttaaaggtcaattgatcaagcgactgcccacttttcaggtaggctttgcggaagttgatctccgaaagggcaattgccatccaaacaatgacgacggcaagtcctgaaatggatactaagaccaggtacaccgaaccggcggcatagacactcgacaatagggccagaatgccacccagcatgctagtaattagggcgactaacggcacatcgcgcttcgtggttcgtttgaaaacctttggaatggttccctcgtttgcaagtgaccacagcatgcgggtagacgcgtagaggccagaattagcggccgacataatggcggtcaatacgacgaaattcattaaatcagcggcgtagggaatcccaatcgctttgaagacgagcacgaatggactttgcgtcacacctgcttgtttgtaaggaatcagtgcggccatgacgaacatgctaccgatgaagaaaataatcaggcgccagagggtcgttttgattgcggtcggaatggtgtgggccggatccttagtctcaccagctgtaattccaattagctcagttccagaaaaggcaaagttgaccgttagcatagttgtaaagacgccaccaaaaccattggggaaccaaccgttacgcgtatagttgctcagaaacggggcactggtatgaccgtgaagtggcaggataccgaccattgccagtccgcctaacacaataaaagcaatgatcgcgatgactttgatactggcaaaccagaattccgcttccgcaaaccagcgtacggagagggcgttaacggtgaagatgaccaccataaagacgaggctccagatccaggtcgcaatgtgcggaaaccacgtttgcatgatgagccccgctgctgtaaattctgaaccgagggcaatcgtccaagtcaaccaatataggatggcaaccgtaaagcctgtgccgggaccaatatattttttcgcatagacgtgaaacgccccggtgtagggcattgcaactgacagctcacctagacagagcatgacgagatagacgaggatggctccaatggtataggcgagcagagttccaattggccccgcttgatgaatcgtgtaaccggaacttaaaaataatccggtcccaatcacgccaccaagtgaaatcatcagcacgtgccgtgattccatctggcgactgaggtgggtttgttttgacataatgtaccggccttccttacttgcagaattaatatgattagactatgattagaaaatcaacaatgctattagaataacataatttataagtagaaaggaaggcaattattgcaatgctttcattaactgaacaattgaaccggggcccggtcgtctcggacggtgcgatggctacggaattagaaaaacggggcgtggcaaccaatagcgcactgtggtcagccacggcaatgttggaccatccggatgcgattcaagcggtccatcagagctatctggatgcgggcgcaaaaatcatgacaactaatacataccaggccaacgtccctgcatttgagcaggctggtattgctgccgcacaagcgcgtcaattgatacaacaggcggtgacaattgctcatacggcgtgtgatgctagtcatgtcacggatgctgtgattgctggtagtattggcccgtacggtgcttacttagcggatggtagtgagtacacgggtgcatatcagttaacgccgagtgcctatcaagactttcaccgcgaacgcctggcgttgatcacggccgccggggtggacgtgcttgcattagaaacgatgccacgtttagacgaagtacaggctttggtacaactaatcacaaccacttggccgcaacaaccatactgggtaagctttagtatcaaggatccacagacattatgtgatgggacgtcattagctgtggccgcaaagtgggtggcggcccagccgaacgtggtcgctgtgggggtcaattgcactacgctggaaaacattgcaccagcgttaaccactttgaaggcggctgtagcggttccgttgatcgtttatcctaattctggtgatcaatatgatcccgtgacgaagacttggcaagcaactcatatgagtcatcaatttgcatcctttgtcccccagtggttagccgccggggcccgcattatcggcggctgttgtcgcacaacgccgaaggatattgcgacggtggcacgggctctcagtgtttcggattccgtcaagctttgaaaaatgttaagaaatgacggtgttttagttcatggtgggcgtgtctcagagatctaagttgtcttgggatgttcattacacactaattattgatttaattatatttgaggaaaacaataactagcgtgctgagcgtcactaggtatggctagcaatttaattgaaactggtgaaaaatcactagtcgggcactgctgatacggtagttgttcacgactagcgatttttgtatgtcaataaaactgttcatatcttggtcgagtaacataaaatatggtagggtaaagatagtgtatagatataacagatgaagtggtcaatcgtccgtgcgtactcgaagtttttgaactcggtgacaggatgagttgatttttcagattgagaagggaacggctaggtgatgtattattttgtgggtactggtttaggattgaaattgacgggaattgaaaaggcacagttgaaccgactggcgctatttgacgccactggttatcaggctcgatgcgtctatgtcacttataatccgcgtttacatgagcatgcggcccgctttggtgcggaaggaaaatgctttagtttggtagattgcaaatttaatccgaatttttggacaaatttgtcagcataacctgatacggtgtttgccagtcgagtattttaagcggtcgctggttaatttggagtaacgtcgtcgttaaatcttgagcactaatgtgctcaaaacgagtccctttagga

SEQ ID NO: 25 - DNA, 9795 bp, synthetic construct
  source 1..9795: mol_type = other DNA; note = Lactobacillus plantarum PDA6 - Contig 25
ggaaaatatcggcgcctctggcgcaattgtgagcgaaagctgaacaccagtaagatgatgattagcttagccttcctgcgaatactcttgaaaagattctaaacacgttcttaagactggtttagagctgtcaattccttatgctcccacgctttgctcgtccgctaccattgacagcaaacagttagctcttctaaaacataataagaatttaactgctatgtcccttttaaggcctttattttcaattctcagcagttttaagcatatttacatataatttatgccaaaacaaaataaaaagccctcagtgagcttttagagggctaaattacaaatcctggtcgattaataatatcttcttgtcttttttgcaaaatgtaagtgtacaaggaattatacaaattctgtttgatctcatcaggttcatgaacaaaagcttcaaacaattcttgaatatcaacttgccaaggatcagcaagcatttcatcaattggctttaatacttttttttcgtccatctgagttactcctaacattagctaattatttcaggtttaaattaaaggcatctttttatagttagttattcaaagatggtaattaagtttagaaagaaaaacggtgtaaagcaattaaaaagatttgtttgagcgcagcgaaatctaatacaactttttttagtataagcacaatcaactttagttgttgtgtgtaagtgcgcattgaactaaaaaacaacctttatttcaatgatcaagttagctattttttagcgtcattaaacggaatgaaatgagtttaatgcgcacttacacatagaatttattctatgttgtgctagacccattaaaaacctgtatcagaagtcgccgttggcgacaacaaaatcaaaccaatttacccaaaatcaatttggttcaacatgttttctgtacttgcttgattcaagcctaaataagctaaagtcatggcttcacttgagtgatttagtaagtgcatgactaggccaatattgtaatttgattgcgtgtaaacacgataagccccagttttgcgcatcgtatgagtacctagataattaattcctaacagatcgccaaccctactcataattttgtagaactgtttttcagtgatatggcgatctgggtgttgaatggaaggaaagagccattcagatgctagtttatgatcaagcagccattgacgatacaataagagttctgtttgaactggtttaaggtacaaggtattaggcttaccagtttttcgatcatgaatgaacgcattttgtttaatagaaccgtccagattaaaaatatcggtctgttttaaacccataacgtcactcactcgcagtagcgtcgctttaccaacttgaaaaatcgtatagttacgtcggccagcttaagaagctgtttagtatctttgattttgaccaaataatttgataaactactgtcaaaaaagttggtaatcatatgcaacattttattcatcattaccaaagcgatatttctcggcaacaattcgatttgatccgccaggatctggaagcttcaagaaaacgaactcacccaaaacacattgatccttatgatatcttctgtgccatgctctatgtccttaaaaatggttgtacttggcggttcatggaaatcaggacatgaaaaataaggaggtgtcatctaatgagcttttttaaaaacaacacaaaacgaatacctactgaagtgaaattacttactgatatacaaaatgctttagctgatgcaccaactactgaagaaaaaccatttttactggaagcagaacaatctttaaaagacaaaaaatatttgccaaaaattttaagtgatttacaattttttttaacgcccctagcgataaaatctgccctatccccaaaagttaaagttatctatttgaatcttatctcagataaatatcaaactagtacaacgggtagtggtattggaatgatttttggtggttttagtggatttggtggtcgctagaaagaccataccactaattagagatattaaattacgttttagccacatcatcgttttaactgatattttgattttctgatttatcttactgttagtgctatagcatgatttgatgtagtatgcttgatttcaaaataacgacagttagaacaatagaaagggccagatcagctattaacgctatttaattctgcctgagggtgtgaccgaagtttcctaaccgtgggcttgattttagcaacgaccaacgggaggcgcagttaaatgtgagcgtgggcttcgctcactcctttttttatcaaattatttggtcaaaatcaaagatactaaacagcttcttaaagttattgagtaacgtatcttgaacctctttaagaacgtttgaatctttgatgggtaagacaacttgttgcataagctgttagttcctttactttaaaattaatttagttgcagaaaacctaaaaatcgaatattatgatgtagtacgatggtaaacttgaaggaggcggattagaatgagtaatactattattaaaaacaagacaatttcaactcgtgtaacacctgacattagtgaacgggctaaagctaatctagcaaaacaagggctaaccgtttctgagtatatacgcttatcgttagttaaagcggccaataatgaagttcgattagtcagctttttagattctccggaagccttagccgctaaaaaagaagcagaaacagggcaggtcaaaaacattggttcattgactgactttgaagattggatcgataagttagatgcaaattaaacagactaaatcttttgaacgtgaattaaaaaaactagtcaaaaaacatttcccaataactgtcttgaagccttgtttagaagcaattgttgaacaagatgtacttgttttgaatcagattaaagatcatgcattaaaaggaaattggcgtggttatcgtgaatttcaccctgccagatatggaaactatggcaaaaattatgacaactggattgttatttatcagctagatcatgatgaattgattttgttattggttgcaactggctcccatgaaatcttgaatcaatagctataggttaggggtacttataaaaaaataaatcaaaatagcccccaatatctaaattatagatattgggggctattctttcaatgtttttgaggggttatttgttaaaaatgggcccttaaaaatatatagcttacttgatcttcccattttcctggaagatcttttttgttcgaaaataatccgacaaaaatttgttttcttgtttttctgtgctaaaattaagccgtctactcgaacgtgtgttcgaatattgagcaaataatttttaaggaggttgaatcagaaactgcttactcatttgatagcttgttcgttgtaggcgcttatggttgctaaacaacacagaaaggacgatttatgtatggatgaaatggtaaaagaaacacaagtctggctcaacaaaacttacggtaaagtttctggctttggtaaagtacccgaggacggtaatactggttggaacacagtttatgggttaactagagccctgcaacacgaattaggtatcacagatctagttgataattttggcccttcaactgccgctaaatgggatactcaatttgctaataaagttaaaactggctttaagcacaatgttgttaaaataatccaaggtggcttttggtgtaagggtatcaaccctgaagactttaccggagaatttactactaacacggctgctgctgtcgttgaattaaaaaaagacgccggtatcaaagacaccagcgccaatgtaaactcggatattatgaaagccttgttgacaatgagcgcgtttgttttagttcctggtggggacgctaaaatccgttcaatgcaacaacagcttaatcatgattatcaagcttacactggtattttaccatgtgatggaatttatcaaagggatacgaacactgctttgatttatgctttgcagtcagtggaaggtatggatactggaactgctaatggttattatggtcctggtacgatcaataaaacaccaactgttaattctggcgcaactggggcaatcgttaaaattattcaatatggtctttacgttaatggtttctattcaggcgccttcaatggccaatttacacaaaatgttgccgacggtatagtttcctttagaaaattcatgaagttgcctccttatacttcaactgctgacctaactgtgatcaaaggcttattaactagtaatggtaacactaaccgatcttcagatggtgtcgacatggctactcaaatcacatcagctgctacggctaaatcactgaaagcagctggctataacattatcggccgttatttgacaggaagcgtcgggactggtgctgataaacgagataaaaatttgactaacactgaagttaaactgctattagatgctaaccttaagatttttccgatttacgaagatggaggttatgaagaaagttattttaatagcaagcaaggtttcgcagacgcttctattgccgttaatactgcacgtcagcttggcctaccaagtgggacagttatctattttgccgttgatgttgatattcaagatggaaacatgagtagtacggttgtcccctatttcgagggtattactggtattataggatcaactgaatataaagcaggtatttatggaacacgcaatgcgtgcttgcatgtaaaccacttagttaagtatagttttgttgctgatatgtcttctggatggagcggaaatttagggttcaaaatgcctgaaaattggagctttgatcaattcaatgaatttactggagcttcaacagggattgatatggatcaagttgctgtctctggtaaagataacggagtttctaaagttaccaaagttaatataaatcctaacgctgctttctttacccaactgcaacaagtagaagaccaggcatatagttatatcagcggtgaaagctcttcaacacctgctgaacaacttgttacccaattttatagacaattttcctattcttcaccaagttgggcacccttggccggtggattaaatactagctggttagcattcgcaaactcagcattacatgtttcaaaagaaagtgacttcgaaactctttatgatagtactactggcataaaaattggcttaccacacatgatggcttctttaaacgcacttttattttggggagaaccacagtcagcctcaggaattcaggaccttgggggctggtgtggagatcttttaacaagtatagaagatgctcatcttaaccagaaaaaatacggctctttttatgaatcaattactgcatatgtaggtaataaagggcaatttggaagggaagatttggttgacgatttggatgcacttaacgtttacagtacaatccattcgcaaaacaaccaaactatatccaaaattattaaaacttattacaccggtaatgaaagctccgttcgctttaattcttacctaagtaatcgttttgatgatgaccttgattcactacagaacgacacatatactcttttaaaaggtggtacaggttcatggggtgcagcttataaaaccgctttattggcttttaaaaagtttaaattacaaaaatatccttcttatactgacagtgaagcaaaagacgccgctaaagcttttcgcaagttaattgaacaaaacgcatagaaagtaataagcaaaatgataaactatatatattagtttatcattttacttattttagttttttacttttatctaaaaaatagaaagaggtgctaaatcagccttgtactcatggttaatcgtaatattagttgttttttttctcataacaattgattttttatatttatgtgaccatataaatgatactatcattgaaaatggctattttaaaaacattcttacaattattatttcaattttatctagttggttcatctccaaatatttgggccctttttttctaaatttcacttcagaagttggagttaccaattcattcggctttatattaataattgttgcattaataggcttttcactcctattcaacgctgcaaggcatgacattgtaactaggaaaaaaactgtacagcaggctcaaaaaaaatacttcagacacaatcaagtcctaactttttctatggttcattacgtaatcggaataagtagtgttgtaatagttaatagcattgtatatttaccaatcttcctcgactttttaattccgattcccaaaagttaccctggtaacgttgaaaaaattgaactccaagaattcattacttttattattactcttgtaatgccttttttaatcatagtttttacccccttttctttgaaaaaattactctcccatttcaataaatagggtccattatctagtatagaccctatatcttcatagcccctttctgtttggtgttaaagtattagtcatcgatgtcatgcactatcttgtttagctccgttttgatggaactggaaatattttctagattgaaatgattatatatttctttatccttaagcatccttttttgtgccttatttaatttacactcattgttacccactacccattcatcctttgtacgtataaaggggttttgcgcactttcctttaacgcgttttgaacatcttcataaggtaaataaaattcaattgtagatttatttaattttacaatctaccatataacgtctccatcttttcaaaacgacttaattctacgggctataaataacttaatttgccagtgtataacgtttcagattaagctaccactaagttataataaccatatcgaaaggagatcaatctaatgaaatatacgaaaaccaaagcagtattaaatcaactcgttgccgatttgagccagatgtcaatgattatccatcagacgcattggtacatgcgtggacccaactttttgaagttgcaccctttgatggatgagttcatggaagaaattgacagccaactcgatgtcatttctgaacggctgattgcgcttgatggcagtccttactcgaccttaaaagaaatggtcgaaaacactaagattcaagactggcctggtgaatgggacaaaacaaccccagaacgcctcgcacacctagttgatggctatcgttacttggaagacctttaccaacacggcattgaagtatccgatgttgaaaaagacttcagtacccaagatattttcattggtctcaaaaccgcaattgagaagaaaatctggatgattcaggcagagcttgggtcggcgccggaaattgatgaataaaataatattaaaaaatcggtagacttatggtagattttaaaattaatccgaacgcccatttggatattggacagccctagttcacaaaaggtttcgattttaattcgttcggaataggttatactagacaaaagatcagctcctaaaagatgggtttgtggtaaacaccattttaaaggaagctgatcttttttgtccgaacagcgttcggattaattttacaatctacccaccagaataatctgtgggacagtcccagccctcaccctttagcttggcagctacagattgttcaaatttatcttccgctatttaactagtcttcttttcttttttagttgtaactatttaccaaaacgccaccactttttaggtttaggttgtgactccggggtgctattttcaggttccggttgtttgtctgacgtcacttctttttcactattatcatgcggtgccatcgttaaggctttcaagtccttaatttctgccttgtattcttcgagcagttgtttgtcctgtaaggccaatctttgttgctgatctagtaacttatgtaactctttcttttcagattgaaattctgatactaaatttcgaaggaatttcacttcatcttgtccatcaaccgcatcttttttgttgtcgtcaacatcatctttttgttgacggtatcttgttgatgaatcgtttgagaacattgctttaatagctttttgcccatcaacatcaacgtaaacagtattgccttttgttgatgtaaattgacgtaaatcgattgacgcatctctttttatcttttgccatatagcctgctttgaaacgcccaattcatcagcaagttctctaatagttttaggcatgatttccaaacccctttcggagttcagcaagtgcttcttgtcttgcttgatctcttatttttttatcgtgctcggcctgtttatcagccaatgcttgtttctcagtagagcctaaagttaaccccttaaccttgtcaatggcgcgccatttttcctgctctgttaattcaccattatgctgaatattaaaaagcttttgacgctcatcttgtaattggccttgtgagaaatcattggcatctttcttttctggtttccaggtaaacgaatagccaataactggtttcccacgccctttaccatatttttttctaaccgttaatcctctaaacaaaggagttaattcttctttaatgggttttataacaaatttatcgacgttagagggactattccagtaacttttgggcatatctagtaattcaaaaaagtcttctttagaaaaataagcatatccagtggttctgaactgttttagtaaccgaaacattgtttttgcgtaactactttttaaatctctaaactctgccaacgcataacgaacccaactttcaagcttgtttaaaaggggtaaagcacgttcataaacttttacgtctacataaggttcttctgcatctccatcaattttaaattctgtaaacaaaacaaaaaactctcgagttaatccacttttacttcgtctaccaaaatgtaatcccatcattttttcataagttctctgaatgtcatcttcaaaacggttatttgcagtaggtttataagcacttagctcttttaattgatcaaaagtaaaacgaatggtctgatcactcttatcacgcatacgagaaataatcgaaaaaaataaattcatttcaactggagtaaattttcgaagtggaatggtatttaactctggatcatatttaataatttcatttcccatgctgtacctcctaatgattacaaattaattttagattatgtttatcaagtagtcaactttatagttctacttgataaacagacaaaacctacttgataaacagacaaaacctacttgataaacagacaaaacctacttgataaacagacaaaacctacttgataaacttctataagccttgggagagtaaggttcaagaggggtctaaaagaggtttaaaagaggtttataaaagaggtatataagaggcactactgtacgagatcaagacctaaaatcaaaaacacaaaggagtgagccaaaaaccggctcacattaaactccattcgctacgctctttgcgcctcacttcgttcgttgcctaaaaaggtgtggcaagccacatttatacgggcgctgacgccccgcaccccgtcaagctgaaacagcttgaccgttttttcactcgccgttaggcaggaaagcaaagttttatagaaactttggctttcgccaattcagtgttagaacgtgtttggatactttgacattcgatttgattttagttaaattagatcaaaaacaggagtttttaatccatgaaaagctttgcacaccattatagtagcgacatctc

SEQ ID NO: 26 - DNA, 8304 bp, synthetic construct
  source 1..8304: mol_type = other DNA; note = Lactobacillus plantarum PDA6 - Contig 26
cgttcaaatagtcgcgcagtagccatcgtttcacaagaaaaaatggactggctagaaagagcattaaaagcgaaagaaggttcgttagaatatgcaattgcacgtgatcagttaattaaacgccatgttttacctgacgatgaaattgttgaatcagatgatgattattggagtcagtttaaataatgaaaaaactaagatttaaaccacgtgcaacctttaatgctgatctaaaacggttagccagtttagacaaatctattattgatgaagttcgagcagccattgacctgttacttgagcaacaacaattaccaccagaatttgaagatcatgagcttaatcggcgaatgagcggttataatgaatttcacttacgagataccccgaaaaacaaaacaccaagcgaaactaacgatgtcctggtggtttatacgattgataaagatgaactagtcttaattggcattcgagtcggatcgcatgatcgtttatttcctggtcaaaatcgtgctaaaaggtatcgaaaaaatgacaaatagaagaagttatttttataatatgaaaataaataacccctaatatctacattatagatattaggggttattctttcaatgtttttgaggggcgattttataattatagcccctttgaaattttatataaaaattcgtgttaaccatacagacaataaacagattccaaaaaatccggaccttgatttaaaggggacaccacaatattttcactctgacatgggttcacagtacaccagcaacgaagttgaaactttacttgaacggcatcagatcagccactcatactcaaaacaaggttatccttatgataatgggccaattgaagcttttcactcattgttgaagagagagtttgcctttcaaacaactttttccaattttgaggacttggtaatccgaacctcaaattacatcagttggtttaattccgacagaattagaacgagtgtttagaaaaagatgtgccatttattgacataggagcatttggagttactaccagtgtatctcaaggtgaaaatcttacattaacaggtttctcacacgacaaataccctaatatgtcatcagccagtggcactgtccaagcactaactaccgaccgaattttttacacaattgatatgacgggtggtgctagtggttctggactattaaatgccagtaatcaaattaccggcattaattcttacgaaaatagtgtaactaattttgggacgcgtattacttctcttaagatggattatattaattactggttaggaagtcctaaagctcataagtatgggaaaaatgtgacaatcacgaaacaagatattttgtggggtaatctgacatttacttctagaaaagcagacaaagccaccatcggaaatgactattctgcaaaatatatttacaataatccaaacggaagttcttacttgtcactttatgataagaacggcaaatgggctggatatattaataagagtggctcaagggacttagtacctgtttcatacaataaaaatgtcactattgtcattaagaaccaatggttctggggagacttattgtggaaaactaaggaacattccacaaatgattatcttaatcaaaccctaatggctaagagatattatacgcttggtaacggcaaacgtttttattcaatctactctggtgatgcttggctaggatacgtaaactcagcctatactaaataaacagcgacaaaaaatgattttatcatcgaaaaaaagcttgagagattactctcgagcttttttagttaacactaagtactatacaaatatcaagtgccttttggacacaaacacgcaacccattttaaatgttcttaccgaataaaaataactttcaaatactaatccagatttcaaattaggttgttttgagatgtgcttgtctccttataaaggaaaaaaattgaaaaataactaaaattattaatgttgaaattgacactaagcttgcatatttttgaacatccgttcctctataccaaatgtgaattattcctgagcgttttggataaacacaaatttgatgattcttagtttgtcttatctttaattcatgcttgttttcagtcgctgcataccctggatacatcaataatggcacaaccagcttaccttcatttgaagtttttgataattggtatcttattttaaactcattcaactttctactaactcttgtcgtccgaccacgtaatgctttcacatcgtttgacaaaaattgctgtttggtaccaaccggtaaatattccttaccatttccaatttgcattgaatcaatagctgtttgactattaacaaatttttcatatgattttctagttggtgacgtgattgaaaaaattactgaaaaatccataaataagatgagtactatagccagtattttatatatctctaatcgtctccccttacttttatagcattgaagttcaccgtatatatacatcccgcttccaattgctaacagtaacgttgcaaatacatttaatctcaatgggtattgtaaaaatgcaagtttcgtataatcaagtaattgctcccaaggcaaaacatttgtagagctgatagcaataattattcccaatatgataaaacgatcaccatatataagccatttttgcttatggcacataataattctaattcccacgactaacgtaaaaataatacccaaatttgtcgattcaagagaatttgcaaacgtacctgaaaacagatcaaaaggtgacttaataaaatgattaatatttccaatttctgatgcattgatgaacattggcactcgcttaagttgttcaagcatgggcaaaagaaatgttgctgataacaaaaagctcacaacgctagctttaattagatttactaaaattaatttattttgaagaacttttttcacattaaaaatcaaataaaaaagtaacattatgccacacattaccgtagtgattaagtgcgtataaacaagcaatgtcattcctagacacaaacataaccatccatgattacttgcattcactaatcgatacatacccaataaaactattggcaaaaagatcatagcaaccccttcacctaacgcatttctcaccagtaactcatattgataaaaaatcgatgtcatgtataaaattgcaattaagtatgcaagtagttgttttttggtaaaagtccacgcacacacatacgtgataactagccccgaaaaagtggtaatcattatcagtatcttgtacaaagttaagtacgaaaagctgaacttagcccaaaaaattaacggataaaatattaaattgctataaaacataggtgaagcatagccgttataattcaaaaaagttactgcaatccttggaaaatactgttgatgttgaactgaaaccaaaaagctcttcaacctattcatgtgaaagaaaaagtcagaactaataataacaggatatttttttgtgctccataaggaatacgaaaaaaggatcgtgattaatccgaaacttactataatgccgaataattcccaaatattccttttatttttccttacatttttaaacataattcgaaccacaaacctttcagaaaatgaattgaagcaacacattatagttattaatttacaacacgttcgtaaaactcatgcatagcttcatcattatatttatcaaagtcaaattttgcaggctttagttgtctgctcctatcctagtatttggtacataaatttctgaacagttgtgccataattaataaaacaagataggtggattgataaatttggtaagtaagtcttgcgactgctagaccaaaccagcaccaagctaatatggctgaaaacccttcctagtatgggtgcagtgtattgcatatgcaccaccacctttcaagcaaaaacagccactacccttaaaactctacacgatagaattatatcatatgttgagagacgtattctaagcccttgttgacttgctttagtgcatagttcactataatatactatacatagccttttactatgattatttagttagatataggcttataattgttgattataggagtgtaatgttaatggagactatatcaattattgctaaacgattaaatgtcacaaacggtcgtatttatcagataatcaaagaaataccggctgataagcaacctaagaaagatgttaagggcaagtataatttcactaaagagtccgtagaggctatagaaagctattataatagttcaagtagtcctaagatcgacaatgaaagtgatctagtgaagcaattacgtgaagacttagaagacgctaaagcagagattaaggctaaaaataatcagatagacaagtttcagcaattactaagtcagcaacaacaactcaatttgtctactaaccgtcaaaatgaaaagctacttgataccaacaccccctcacaggacgatagtccccttaaaagcgacgatacagacgtttcagagcctaccgagggtaattataagggggaagaagtgaagacgcctaaaaagggcttattcggctggctgagacgttaaaaatacccctttgtcatattatcggcaaaggggtataatactgtttgtaactaaattaaatagacaaaaaaattccctcggtcgccaccgggggaacacataacccttatcaaagtttatgtgttcattttacctactattgtaagatttttcaagtaggtagagttgaatttttctggatcacgggggagccaagccccgttactagagtggcaacattctagtcaagccaactaatcttacctttcgaggactgacagccggttagcggagctaatgaaacaagtcgacaggtcaagtgagagccgccgctataaacccccactaggaattaacctatacttgtatttaggttggttccgaacggtggccccacgcacggggcgggcggtaaagcagtacgaaagtacagggctattacgcaaggccagtgatccaaacaactaaaaataaatgattgctggcacctataaagggtgctttttttataggctaaattagttaggctaatctacaagcgcaatagtaacaatacaagtgtttttacgtgacggtgattcgtgacgaacaacaaaaagttttcttcttcgcaaaacaaggggaaaactatatcccgctcaggttcaagcgttctgaacagcaaagggcaagtgcactaaactggtttgaacttgagggttaagagcacgtggttgcgtgcagataggttaaactagggtgttattaatgtactaatcgtcacgtagaccacaaaacgttaagaactaactactaacgatagacacactattaatattatatagtctcagcctaggcgggttctaagccgacatgtttcggacaattatacatgaaacgtcattatcgcatgatattggtaaatatatagccttatattgttgatataacaacgtttttaacacttcacaaactttagcttttattaatggggattatgttaactagtagaaattgagtggttgcgtctatttctgaccatgctatactgtgcttgtactgcatgacatggcattacacactactttcagtaacttaactgcacaataaaaaggcctacccttaattggatagacctttttagtattgcaacaaatttttaccatgttatactatgcttgtgttcaggcatgagacacttctttcattttgaactgggtgtaattgatctgagttgacgcagattaattctctctaaaagtatagtaaaaaggcctgttcttaactggatagacctttttattatgtcaattttaatattattataataatgtgtgctatctatattacttgggggagcggctatctgtttagatagtcgctttttaatattgcaatttaattagaatgatctaaaataaagttgtcccattagtcgggactcatgggattccgtttcgaagtgacaacttcttagtgagcacttacccgggtgttcacttttttagtattgcaccaagtttgcatagtgctataatcatgcttgtgtctccgacatgacacaaacacctacttcataatagtgtgacgattctagcaaaatcaaaaaggcccgtcattaatttgataggcctttttgtgtgctaacaagcaacctaagcaactttatacgctaaaaggtgtaaaaactagttaaaagctgtcaattccttatgttcccacgttttgctcgtccgctaccattgacagcaaacagttagtttttttgaatcttaacaagaatctaactgctatattcgtttttaagggccttatttctcgtttctagagattttgagactgtttatatatatttataccaaagcaaaaataaaaagccctcagcaggcttttagagggctaaataacgaagccaggacgattaataatatcttcttgtcttttctgcaaaacataagtatacagggaatcatacaaattctttttgatctcgtcaggttcattgacagaagcttcaaacaattcttgaatatcaacttgccaaggatcagcaagcatttcatcaattggttttaatactttcttttcgtccatcttaattactcctaacatcaaaataatgatttcagtttagatttacaaatcttacaacaccgttattcaaaatttgttaccaagcttataaaaattctctgcacaaagcaattaaaaaattttggcttaaaacagcgtaatctgcaacactttttaagtatttaaagcataacaaactcagttaagtgtaagcataaattgaattaagaatacattccattcaacaacggaaaaaatcgattctatggttatcagcagaccgagtaaaacgaggtcaatgcgcacttacacccttgacaagtgtcaagggtagatttaatccccattttgatggggattatttgtattagaaggctagcgccaacgataaaaatcctagagctaaatctcaagattaatcaatcacattacgaaggatccaatgactataagcaagacgaacactgggagttattacccaagggtgattaatttcgaaaatttgaatttcagttgctaagtaaagtggcgtcttaccatgattaaaagcaaaaacgggttgcggaaaatcaggcttactagcaacttgatgaacactttgacgagagttcatctgccagcgaatttttaaatcttcacgcgacaataactgtggcagctgtgttttttcaagttgagcttgttgctgcaacttttgtgtaaactcttgtttagtcttgttttgatgccaatcatcgaaaagatcatacttgtttgatttaaaatctaaatccataaagccagcctcctaaccaaaatcaattttatccagcatcgtttcagtactagcctggtctaagcctaaataagctaaagtcattgcttcactggaatgatttagcaaattcatgactaagccaatattataatttgattgcgtgtaaacgcgataagccccggttttacgcatcgtatgggtccctagataattaattcctaacagatcgccaaccttgctcatgattttgtagaactgtttttccgtgatatgtcgttctgggtgctgaatcgagggaaacaaccagtcagaaaccaaatggttttcttgcaaccaagcttgataggctaataaatcagtttgcacgggttttaagtagagcaggttagctttaccggtcttttggtcgtggataaacgcattctgacgcacggtgccgttttcgttaaagacatctgtccaacgaagcttcataacgtcgctcactcgcaacagagtcgctttacccacttgaaaaacggtatagttacgccaaccagctttgaaattatggagtaacgtatcttgcacttctttgagaacatttgaatctttgatgggtaagacaatttgttgcatagttttagctccttaaaaaattgatttttagtacaaattaaagtacaatattaagtacaatgaaagggtggtaaatatgacattagcattaacacagagcgattttcgcgccaacctaaaaaaatatttagatcaagttaatgacgaagacgaaaccgtttatattgctcgttcaaatagtcgcgcagtagccatcgtttcacaagaaaaaatggactggctagaaagagcattaaaagcgaaagaaggttcgttagaatatgcaattgcacgtgatcag

SEQ ID NO: 27 - DNA, 8151 bp, synthetic construct
  source 1..8151: mol_type = other DNA; note = Lactobacillus plantarum PDA6 - Contig 27
ccaccgagggttcaaaggactccaggacaccttggaagcatcatttatttaagttagatacatattatatgtacgaaggcatttcatttacacaagattcttgacgctaccttaacggatgatgacactgacatactttcaattgttgtatcactaaataccgaagaaatttttctttgtttcaactccgaattcacttgtgttttaaagcttttaagactcaaaatttgatcataaacagtaatttgtgaagtatcattattagtttgtaaaaattgtatttgcgactgatattcaggctttttaatcaaatagttccaactaacaccagctgcaattgacaaaccaatgatacctattaacaaaacaatatgtcttccaatgattctaagcacattttttaatttaattcgtaattccattatttatcctctacattacttaactcttgcttcaccgtcactaatgctgcatgaatcacctgatgcatatcataatatcgatactgccctagacgcccaccaaaaatcacgttgccctcctgctttgcaagttcagcgtattgcttatacaacgtgttattgcgagtattattaactggataatatggttcgtctccgcgtttccagttagctggatattcacgagtaataattgtcttacccttgtcaccttttccaaattcaaaatgcttatgttcgatgattcgagtatacggtgtttccgcatccgtataattaataacagcatttccttggtagttgtcaacgtctcgttcttccgtttcaaatcgtaaagaacgatattccaattctcctaattgataattgaagtattgatcaatcatcccagtaaatatgatcttcggaaagtcggctaaatactgatttttattggcgaagaaatccacaccggtctcaacatcaatttctgggtgatccaacattttttcgacgatttgcgtgtaaccaccaattggaatcccttgataagtatcattgaagtagttgttatcatatgtgtagcggactggcagtcgacgaatgataaatgctggtaagtcggtcgccttttgaccccattgtttttcggtgtagcccttaatcaatttttcataaacatcagtaccaattaacgatattgcttgttcttcaaggttcttaggttcgccgcttaactgagcagcgtctttttgttcctgaatttttgcttgtgcctctgcaggtgtccgaactccccacagttcactaaacgtattcatattgaagggtaagttatacatatgtcctttataatttgcgactggactgtttgtataacgattaaattcggcaaattgattaacatactcccaaatctgcttatcagaagtatggaagatatgagcaccatattgatgaacttgaattccatttacttctttggtatagatatttccagcaatgtgatcccgcttttcaatcaccttgacgtgtttgccacgcaatgccgcttcatgggcaaagactgcgccgaaaagtccggcaccaacaaccaaataatcatacttactcaatttaacttcctccaagaatatatagtctcatcatgtcattatatcaaaaaaactttaatgtaaaagggcaatcgttatattgttgtgtaaacatcgataaaaaagacgactatttttacaatagccgtccaaagtaattatagtattatctacccaatcccaaagaatccatgcataaacaacgccgcacaagcagccccaacgaaaggtgcaatcccaggaacaatgatcccgtattgccagtcgctgtcagccttgttcttaattggtaagatggcgtgggcgatccgtgggcccatgtcccgtgcaaggttcatggcgaatccggttgggccacctagccccatcccaatggcccagactaagagcccaacaccaatcggcacgatccccggcgttttcacttcagaaatagctaaaatcccagaaataaaaataaatgtatcgaagaattcgacgaagaagttccgtggtaagttccgcacagcgggtgcggttgagaataagttccgaatcgtaattggggaaatctcatcagcagaagcggcaaaatggtccgcgtacatgatccagacgatcacggcaccaacgaccccacccaaaacttctgcaactgaatacgggataaacaatgaccatgaaaggttccctaaaatacattgggctaataccatggccgggttaatgcagacattgccgaaaatgaagagggcaattgtaatcccaaaaccccatgttgtaattgcgaagatatggccggaaccgcgatacttggtcccctttaaaacctcactacaatgtacaccgacaccaaaaataatcatcaaggcggttcccatgaactctgccaaaagctgatgaatcactatctttctcctcctgtggcgttgttacgcctgtttattttgaaatagacgccacttactttcagaaagcaccggcacttttttcacacgaacaccattatacacaaaatccgaatcgtttaatatgtaaatcgcaaaaagttttgattttacaggattaaacgttcggattcaattaaaaggttctgattattcttttttagtcgtttttttgcgtttgaagaattgtcgccgaatgcgacgaatcatccgtggagactttggctcaatcttatgctcaaaccattcctgcaccgacgcattgacgacgccaccaaacatcaagagaatcccggaaaagttcaaccagaacattagtacaattaaactcccaatcgtttggtaagtcgtaatccgtttagcaaataattcgatatacacccggaacccttgcgagatcacgatccagccaatcgtcgtgactaacgcccccgtccaaatgtaacgcaatttcaccttggcgttcggtacaaagtaatacaacaacatggcgacgacgaacatcccaacaaaggtaatcaagttcttgttttccaacaactgattaatccaattcggaatgattgcacgcgtgagatttgttaaattcaagatcacatctagaatcaattgactcaacgtgaagaaaatcgccagccctacgattaggagtaatagtcccaacgttaagaaaaaggcaataattcgcgtccaaacggcattttgggcatccgtaaccccgtacgcctcatttagactcctgcgaattgcagcaataattttagacgccgaccagactgtcaccaaaatcccaattgacaaactactactgctgccactggacaggaatgaaactaaaatcggcttaaacgtctggtagacgttactaggaatgacttcctgagcgtacgctaaaatctgcccagacttcaaatcgaaccgggcaatgaggtttccggcaatcaagataatcggggcaatcgacattaacgcgtagtaggccagcacaatcgcattgttgctgacattggcttgtccataccgccgaataataatttccaggcttttcgcaattttagggtaacgggcttttaaattcattcatttatcctcaacgctcacttatagtatttacaattatacaatggaatgccgcgggaaacaccttttatactaggattagtgctttcagcgaatagactagtcggtccaatcagatcaattgatggcaatacctgaccactgacgagtaaaatccgcttatctcccagccgtcagccactttgacaaaatcaagtagctgcctagacactcagtagtaccgggccatctagattttaacgcaaaaaaataaccggtattgatacccccgcggcatccatctccggctacttcactaatttcacatctttacaggagaagtgaaaatttttatcactatgtcagtgcttaatattacactgtttatacaaaaatgcaaataattttaatgtgtaccaatttttttcataatcgcttgtaagatgtattccgcagcatgaccatcgccataaggatttttagcgtctgccatccgttggtacgctgcggaatcatctaacaggctggtcattgctgccgcaacctgctgaccatcagtgccgactaatcgtaacgtccccgcggtgaccccttccggtcgttcagtagtatcacgcaatacgagcaccggtttattcagtgacggggcttcttcctgcaccccacccgaatccgtcataatgaagtaactgcgtgccgccatgttgtggaaatcaagcacgtcgagcgggtcaatgaggtgaatgcgatcggtatggccgaggatacgtttagcgactgtctgcactgccggactcaagtgtactgggtagaccacttcgacatcgggatgctgagcaaccactcgtttgatggcgacaaagaccgcttccatcggggcgccctgattctcacgccgatgcatcgtgagtaagatcatccggtgcccaggctgaatcaaatcaagcgcagcgtgttgatagtccatcgaaaccgtctgttttaaggcatcgatggccgtattgcccgttaccgtgatggccgtatccggatggttttccttcaatagattctgccgacttaattcggtcggtgcaaagtacatgtcggccagcacgtcggtcagctgccgattcatctcttcaggatatggcgagtacttctgccacgtccgcaaccccgcttccacgtgtccgactgggatttgatgatagaaagcactcacactagctgcaaacgtcgtggttgtatcgccatgcaccagcacgatatcaggcttgactgtatccataattgcatctagcttcgtcagtacccggctggtgataccagctaacgtctgattaggcttcatgatattcaaatcatagtccggcgtaatgtgaaaaatcgtgagcacctggtctaacatctcgcggtgttgagccgtcaccaccgttaccggttcaaattgtggctgttgctgcaactgcaacacgatgggcgccatcttaattgcttctggccgcgtgccgaaaatcgtcattaccttaattggttttgtcattaactttcacctgcatcatttagtttctaatctcatcatagcgttagttacgtcgtggcgccatcatttcgagtaaaagtttagttattttcaaggattcagccaaacggacgggtaagcaaaaacaccaccttgattgcaggcacacgttctcccgcaattaagatgatgttcagcccgtaccgtttctaaaaaggtaccgtcttcaataaaatatcacgaatcttatacgcgacctggttgtcaccaccaaaaacaccctgattttcaaataagactaaggcgacttgggcatttcgcgaccccatatagtagctatgaaaattattgtcattgccacccactcgaatcaactggcctgcctggtaataaacgcctgccgaatatttaatttgaaaattatccgcaagtgactttaaaccggcttcaccaactagctggccgctttgaagcccatacataaatttataataatcccccacactcatatatagactaccacagcctaattcactagattgtaacggcttagaaatgatgccactctgaccaaacccattagccaagcgatacgaagtcgggttgatcacattgcccggaatatcgttatattcataggtatgttttaatcccaatggccgaatgatgtcattagtcaaagccgcctgataggatttatgcgtcactttgcgaataacccctgccaataaggtaaagttcgcgttggaataggcataagcatgattattcgtcgaccgtaaatgttgcagtgtaaagttcagccgcgccgtctccgttggtaaaatcgtctttggtgttatctcagtcatccgaataccggaacgatggtctaatagttcacgtatcgtaatctgattggcgtacggaatttccgggtaaaagtgactcagcttcgtcgtcagactcaacttaccctgattgatcagtttttgaatcatcacgccagtcacagctttttgtaatgacgctaatggataagcctccgtcgcagtattgcggacttgattggcatcatccgcataaccatacgttcgaacccggacccccgccggaccgttcgtggtcagtaatagtgtccccataatatgatgacttttgatcaactgatcgatttgcttgattgcctgggcctcagtaagctggccgggcttcaatttaggcttagtcgtcgtttgctttttcgtcgcggatttgatttttgacgctgcctgctgtactttaattgtctttggtgtcacttgctgtgatccccacacacccacgccaatcaaccccagtaagattggcaataaacttaataaccaacgccgtttgttcatcatgatccccccctgtttctgatgagtcgcccgtcaaatctgacttgactactatttaattgccccaagcatacgccctcgcttctgactttgcattaaaatgcgaattattgttagtccgccgaaccaaatcgcaagcgctatcaacagcacggttttaccacaatcactaaaaattcatcaaaatttagttaatttaactcgtgcaatttccgaacgtgaccattaaaatgaagattatagttaacttattcaaggaaggatgatcatattgagtcaagcaaccgattatgtccaacatgtttaccaagtcattgaacaccgtgatccgaaccaaaccgaatttttagaggccatcaacgacgtcttcaaaacgatcacgccagtcctcgaacaacatccagaatatatcgaagccaatattttggaacgtttgaccgaaccagaacggattattcaattccgggttccttggctcgacgatgctggtcatgcacgagtcaaccgtgggttccgagtacaatttaactcagcaatcggtccatacaagggcggcttacggttacacccatccgttaatctgagtatcgtcaaattcttgggctttgaacagatcttcaaaaatgccctgaccggcctgccaatcggcggtggtaaagggggctctgatttcgaccctaagggcaaatcagacaacgaaattatgcgcttctgtcagagtttcatgaccgaactgagcaagtacattggtctcgataccgacgttcctgctggtgatatcggtgttggtggccgcgaaattggctttttatacggccaatacaagcgactccggggcgctgaccgcggcgtactcaccggtaaaggtttgaactatggcggttcgttagcccggactgaagctactggttatggtctcgcctactataccaacgaaatgctcaaggccaaccaactttccttccctggtcaacgtgttgccatttctggtgctggtaatgtcgccatctacgcgattcaaaaggttgaagaactcggtggcaaggtgattacctgctccgactcaaacggttacgttattgacgaaaacggtatcgacttcaagatcgttaagcagatcaaggaagttgaacgcggtcgcatcaaagactatgccgaccgtgtagccagtgccagctattacgaaggttccgtctgggacgcccaagtagcttatgatatcgcgttaccttgcgccacccaaaacgaaatcagcggtgatcaagccaagaacttgattgccaatggtgccaaggtcgttgccgaaggggctaacatgcctagcagtccagaagccattgcggcataccaagctgccagcttgctatatggtccggccaaagctgccaatgctggtggcgttgccgtttccgcccttgaaatgagccaaaatagtatgcgtttgagctggacttttgaagaagtcgataatcgcctcaaacaaatcatgcaagatatctttgcacactccgttgccgctgccgacgaataccacgttagcggtgattacctgagtggtgctaacattgctggcttcacaaaagttgctgacgccatgttagcgcaaggcttagtttaagccaactacatttaatcgcatcaaaaaaaacggattgtcgggactgctccgagtcaagtagacagttcaaataattaaaatagctatgcagtttttagaatggcatgattccgaaattctttcggggtcatgccatttagtgtttcttg

SEQ ID NO: 28 - DNA, 7124 bp, synthetic construct
  source 1..7124: mol_type = other DNA; note = Lactobacillus plantarum PDA6 - Contig 28
gacgttactccaaattaaccagcgaccgcttaaaatactcgactggcaaacaccgtatcaggttatgctgacaaatttgtccaaaaattcggattaaatttgcaatctaccgaatagctatgttacactacttttaattaaagaaatcgtttgagtatcgagagttcggttagtggctacacacaatgacccgacagcaacgtacaagggaagccttgcaacgtgcttcaatgtagattgatattctcctaagtaaggaaccgcttagtgtgaatattaagcggtttttttagtgaaaaaatatttaggagaattactatggaattagacaattcaatacagcaaatgataacaaaagatttagtacaaaaaatgattacttctatgggtggacaatcgaaaagtagtatttcaaacattgattcaaaaatattaactgttttagaacaactttatcgtgagttaaattttagaccgtgctctttggctacttctttagcccatggatataggaaaaatgatttaattgatgaattaataaggttgttaggttatcaatcagtgatgagcctttgtaattaaataaaaaataggccagcagattacactaagtagcttgctggtttttattacgttaaaatcggttttaagacgttttattatgcttgggtataataaaacaatgcaccttaaaatcgcttggaagacgttttaaagggtctatacgatgtgctgtgttgtggtgtgtgattgcttggtgttgaacgtatagattagatactatttggtcgtgaaatatttatcccgctacttttattctaataatgttgatacaatctaccaaatattacaattcattacaaaaacggccttatattacaagcaccccctaaaaacgtaatgttctgattattgcactgtaaacactcactagttatactagtcactgttgattggttgagacatcaactgctcgaccaatagaaaatatatgtaaataatcgaacacacgcaaattataggagggtgtattaattattatgaaaatcaaaaaccttgtattatcatcaactgctgcattagctttattcgctatctcaacaacggttgccaacgctgatacttatactgttaaggccggcgatactgtttcagcaattgcccaagctcacaacacttcagtttcagccattgaaaaggcaaacaagttagctaatgttaacttaatcttcattggtgataagcttgaagtcaatggtactactacaacaaccacgacttctgctgctacaagtgctgcaccacaatcagcaactagccaagctacttcttcaactgcaacgagtgccagtgcaactagtgcttcttcacaatcagttgctagccaagctactagttctgctgctacttcttcagctgctagtcaagcttcatcaagtgctactagcttagctgcatcatcaacagcttcaacaacctcaacgacttcaacacagacgactcaacaaacgaccacgacacaatcatcagctcagactagtcaaactcaagctcaaccgagccaagctagccagacccaatcaagtcaaacacaaactagcaaacctgctgctcagacgacgactcaacgtctagtttcaacatcaaactatagcaacaatggttctgatagtgctgctaaggcttggattgctggtaaagaatctggtggttcatattctgctcgtaacggtcaatacatcggtaagtaccaattaagtgcttcatacttaaacggtgactactccgctgccaaccaagaacgtgttgctaacagttatgttgcttcacgttatggttcatggagcaacgccaagagttactggcttgctaatggctggtactaaaaagccactttaaattaataaataaatgcaaagattgcggatcatttctgattcgcaatctttttttctactattaagtccgtgctgaagcacgtgtgtccccccaccaatacccattacaaagttactcagttgctaagtgactttataataggccttagagcatgctgacaacccgttatttagatatgcgatatgcttattctagcaaccgctttaagacggacacgatccagacctgctagttgtctcccccaatcgacgacccactctcccaaccaaaataccgcatgtttttatttaacaattcaccaaccttaacggagaaaatccaactaatttcctgactaagtacagtcccgaacccccgacagtttgacgactagtccacaacgacaaccacataccattcagctatggcgtaatactaacccagtaacgttttagtagcgatcgtcatgggctacttttggcataaacctactatagtaatacttaattaatcgacgccttcgttaaccgaccacaattgactacacgatgcgcaacttctatcaattatctgctttaccgaaaaataattagtcagtaccacgtctccacgcaataaaatgactagttaagtgtcgctgtaatcagacctcccgacaaattaacccgtcaaaattcactagttaagtgcttaaaattatcgataatcatcgttgacttttcataaatcgaccaaaagtgattacttttatcggataaagcggctaattttcatcattagtttccccaattaatcattgtcgttattgattttccagctagttaatcgggattggtagcgctattttacaatctaccatttacacaagatattttacgctctcggtaactctgctgggtatactagtatcaacgatacgtacactatgtataatgatgcccaagtaaacataactgctgaaaaaatcaagaaaagcaatgggcaagtactcttcaataataaaattaaacctgaagtgcaaactaacaggccaattgttcaagcaaacaattggctattaactaaaaactagtttttggttagagatcggttgatctctagcttccactgtataatagattaaacaagaagttttctacgtaaagtcaagtatattaggactctaaagtcttaatttctgacatatttgacatcattgctttaatcggggcgttttatttctaaatttggagcatcacaaaaggcttcaaagaaattacttctttgaagttaacctaggctataatgaacatgatcaattaattacgacaaaagtctttttgattattgttggctacgttgtaatcatacatttgatcggtgataatcaaaatgtagaccgttctaagcaatttatggattgaagcaatggcaatttttaagggcggtggctgtcttttaccttgcgaggtgaggccatgggaacatggaataatcttcaggaaggtttcacagtcaatgagcgtcttccaggcactctcgttgatgttgctgtttggcacgtttttaatcgcgctactcagctatatcgacaagcaccacaaataaaaaagccgccctgcgtaactttggtaggttacagggtagcttaatgctgtcttattaacttcgccaccgcctttgaagcggcttgcgtaggaagtcttgttagcgcaaggcttccttttctgtctacattatagcatgactatgaaaaattgggtagcaaggcattttcggcatattatttatctttgtatttttcaaaataggttcaactaattctgtttcagcgtttttcgtacttcaccgtatttgtatatagttttccaatatgtttatgtctgccaacggatccacttaatctgatacctaccattatgataaaccaatttacctattaacttagtcttggtgctttttttctaaggttgctaataatgcatcaatccgttgtttaacttggggtcgttgggttgtatcagttaacagtactaacgtatcaccttcatgaatcaaggtgtcaccatgtggaatcacttcttgttcgccacgccggattccaatgagcagtgcttctttaggccatggcatgtctcggaccattttgccgtttaagggactgccaaagaaaaccggtatttccaaatgatcaggtcgatgaagttgctgaacagttttaggcattgtcatctgcttaagcaatgcttcatagattggtgcaccgcctaataaatcaacaacaaggtaagcagttaacgatatgactgctaatggcattaaatgtgttaaattgccaaccatttctgttaccagcaagatagctgtgaagggagcttttccgattccagcaaagtaaccggccatggaaaaaatgattaggttcatgatatagacatgcgataataatcctaattgattcattaagacgccataaaccgcaccaatcacagcacctaaagaaagaatcggcaagaaaataccgccaggtaatccggaaccatatgaaatcattgaaaagacgaatcgtataataaaaattgcaattagtacaaacaaaggtggaacatactggccaaatccaacaattaagccattaccaccaccgagtaaatttggcgaaaagtaaccaactaaaattaccagcagaaatggtacgataccttgtattgggcgtggcaaatgtgtcaattgatgataccacctaggcataactaacaagacccgttgatataagtaaccaaataatcccaaaacaatgccgagtaaaattaagtgccaataatttgatactggtaaactacgtgaataacttaaatgtaacacgggaacaagtccgaaaacattcagcgaaataaaatttgaaccaattgctccggctaatgctgttaaccaaaccagcggtgaaaaattatggtaaatctcttctaagacaaatagagttccagcaatgggggcattaaacgctgctgctaatccagcagcggcgcctgatgcaattagtagtcggcgatcagttcctgataaatcaaacccagaagcgaaaccttgaccaactgacgcacctaattgaatcgacggtccttctcgtccgagaaataatccaggtcccaatgccagaataccaccgataaattttcgccaaagaattgaccaccagtgcatttccaattcaccagccaattgaccttcaacttgcggaattccagaaccagcgatataaggttctctcttgagaagtcgagccacaattaacgctaaaccaaggttgatgccaatcaacaatgcccattcccaccaaacaaacggcgcgattcgtaagtatctatataccaatcgactatagtgcagccctatctcaatacaatagcgaaataagctaacaacggtgccactcattaaacccacaagcaggccgagtaaaacaaatcgcaaacgagtaacgtcaaatttttcttttacaagctgtatcaaataactaatcctccattataaccaatattatataatttagtacttaattaaactaggcaatatctcgatgaaatctagtagttatttttcacagagaaggggtgtcataccgctaaaatgttttagtagtttatatgacgagccgcatgtttgagtagtaatggtgctaataacgttgttaggataatggcagtgataattgccgaatagtaatcatcactgattagtttggcttggtagcctatttgagcgataatcaaggccatttccccacgcgagaccatccctgcaccaacgaggtaagcttcattcgaactgaatccggcccatttagccccacttcccgctcctaatagtttcgtcagtgttgccacaattgtcaatacgataattaataacaaatcgtgttctatgccagctagtgacatacttaaaccaattgaaacgaagaatacaggaatgaaaatcgcataaccgattggttcgatactttgatcaacttcatgagctacatgagtttgtgcaatcgcaattcccgcaaaaaaggccccaattactgcactcagtccaatcagatttgcaatatatgccataccaaaacacaaaatcatcgccattatagtaggtcccactggattcaataatttggtgcctagtctagcgaggagaggggcgataaaacgcatcacgaaataaattgcggcaaagtaaattagctgctctaaaaaagtcagagctagcggtatctgggtatccgtaccagcctttgtacctattaaactgaccataatgctaagtaaaacgacagctagcacatcgtcaaccaccgcggcaccgaggactgttgaaccgctcttactatcaagtaaatttagttctttcatgacagcaactgaaattgaaaccgacgttgcggcaaaaataacgctcaaaaacaagctttcaaattgtgtcaagccaaaaacaataccaactggatagatcagtaccattggaatcaaaactcctaacaacgcgacaattatgctaggacgcaaatattttttaagcaatgtaagatcactctcaagtccggcgataaacattaagatgataaccccaatctctgaaaaaatatggataaaatcattggcgtgaacccaattcaacaacgcagggccaagaataattccaacaaataattgaccgatcactgctgggataccaaccctagaggctatatggccaaatagactagttgcaatcaagatgatcaccaaggtacctaaaaattccaaacaaaaacctcctcatacaaaaaacgtaaacccagatacctcttccacacccctgaaagagaacaccttgagcttacgtcaaccgatttatttattcatattttgataataccctttatatgatagcagactaatcaaaaatattcaagtaacgataagttgtcgtatttagttacttatttcgaaacacggacaccgccaattttaaaagtgacctctgaattttccggcatatgtgccggttcgcctgttttagatatcggaatcgtcttctccagctataaatcatgctggatacataaccgagctaaaaagacaccgtaggtatattatcacgtccaagtaatccaaactagggtccgtctgaaaactacttaagtaagatgcaaattgaggcaatgtagaccgtagccagataaacatgagcgagcttatcataacacgttgcaatcctacgaaagttcttcaactgattga

SEQ ID NO: 29 - DNA, 6637 bp, synthetic construct
  source 1..6637: mol_type = other DNA; note = Lactobacillus plantarum PDA6 - Contig 29
agtagccatcgtttcacaagaaaaaatggactggctagaaagagcattaaaagcgaaagaaggttcgttagaatatgcaattgcacgtgatcagttaattaaacgccatgtcttacctgacgatgaaattgttgaaccagatgatgattattggggtcagtttaaataatgaaaaaactaagatttaaaccacgtgcaacctttaatgctgatctaaaacggctagccagtttagacaaatctattattgatgaagttcgagcagccattgacctgttgcttgagcaacaacaattaccaccagaatttgaggatcatgaacttaatcggcgaatgagcgggtataatgaatttcacttacgagataccccgaaaaacaaaataccaagcgaaactaacgatgtcctggttgtttacacgattgataaagatgaactagtcttaattggcattcgagtcggatcgcatgatcgtttatttcctggtcaaaatcgttctaaaaggtatcgaaaaaataacgaataaaagaagttatttctggtatataaaaataaataacccctaatatctacattatagatattaggggttattctttcaatgttttcgaggggcgatttgttaattataggccctaaaatgcaacacatagttttctatactagcttctcaatgtcccttgtgtttttgtattttcttggcctggtgcaatttatatcttttttcttgatccaagatcttcttagtacgtctattatgttgtcgagttactttttgacattccaactgtttttggagtgtttgttgtgctttagtaccgacaccatactgaatactctttctagctaacctttgaagacgcttaggattgatttttcgttcagaaacagacgaagcacaaacagtttgtttgaaaaagataattctattccaatgatgaataaccagatcgtaaatcaaagttaatttaggttctgaaggacctaagttaatttggctaacttcataagtggaattaaagcgtctttcgaaaatagctttgtaaaacggtggttcatagacaattgttaatgatcccttgatagtagacatcaaacatcctccttaaaattaattaagaaagatggacaaccaaggaggcaggttactgatagcttcgctatgttcggactaccaaccgaactgtgtttttactttctactgctagtataactcaaataccccattcagaatagtttgcttaaaactctgaatggaatatttggtaattatagttcctaaaggtttcttaactaaagacagcgataatcattttggtgattgaataaataattgcaattaccattatccaaccagtactgcacataaattcccagacattagtttgtgcttttgcgtttttggtaataactatgcttttttttagtgaatcatcacccttgatcaaactatctaaggtaatgtcgaacaaattgctgatttgcactaaacgatcaatatcgggataagcactcccaacttcccacttagaaattgcctgacgagaaacattaagcgtttctgcaagataatcttgcgtccactgtcttttttctcgttctttttttatccgttgtcctaaagtcataagcgtaacctcactttcaatagactaattatcatattgaaacgcggaaaaagcacgctaattattagcgcactaaaagcaaccactggttgcgaagaatattctggtgtaaataggggctaaatgtaattatagcccctacacaaacatattttgtaaaaagccttttttctgttctttcaacaaatctaacttacgatgatgaagagcgatagtctcgtctaactgtttgaagaatgaaccaattttttcttgctctgctacacttggtattaatatagggataattgataagtcccccaaatatatccctggttgagcagaaacaacttgtcgtttcctcaattccgtttgaaatttttgaccattaattgttgtaaataaaaattgtgataatatcgtatgacttggtcgtaaatatgcaacacttctttgaaacgttattcctataggattttcaatgatagccgtttctcctatagaaccgacaatagttagaagaacatctcctttttccaaagaaaattttttatgaatagaattatattcttctacagatattttacgatccgtaatctcatctataattattttcccgttctttatgttttttgcacttaataagaaaggcccctcaagaacattttggtgtgttccatgtgttccatcttttaataaagttaactcatttcctaacttacgctgttcccaagcgtcagcaaaccctgcaaatcgcaattcaggaactttggccccatttttagggaacattttttgcaagtagccttttttctgttccttgagcaaatctaacttacgttgatgaagagcgatagtgtcgtctatactttggaaaaatgcccctattttttgttgttctgaaagtttggacggtacatgaatttcaatatttgataaatcacttgaattaatcgctggataactagtccctgtacttctatctaaaacatgttgaacaaattgcttgttttgaacactatttaataaaaaatagctatcaatgttaggacgcatttgagcataaccagttgagaaaacatagttatcataaggcaaattatataaatagttattcatttgatatgggcgaaccgtctgataaaacacatcgcctttttgtgcaagacgctgtgcccttgaaggtgcttgatctttagattcagttctatgcgagatcatttcagtccctacaacactttctaagtctacatactcaaattcatctggaagaactgttttaggattaaattgagctatatcttttaacttacgctcttcccattcatccgtgaatcctttaaatcgcaattctggaactttctttttaactgaatcatctattttcgccatagtccccaccattttcttggtttttcttgttcttctatccttttttgaactttgatttgttcctgcaaattttccaacttctctttaagagcgttcacttcatctttatattgattgtctaagtgtttgaattctgtttcctgtgagggcattttgagaacttttaatctgtcgttttctgctttgtattcttcgagcagttgtttgtcctgtaaggccaatctttgttgctgatctagtaacttatgtaactctttcttttcagattgaatttctgatactaaatttcgaaggaatttcacttcatcttgtccatcaaccgcatcttttttgttgtcgtcaacatcatctttttgttgacggtatcttgttgacgaattgtttgagaacattgctttaatagctttttgcccatcaacatcaacgtaaacagtattgccttttgttgatgtaaattgacgtaaatcgattgacgcatctctttttatcttttgccatatagcctgctttgaaacgcccaattcatcagcaagttctctaattgttttaggcattatttccaaacccctttcggagttcagcaagtgcttcttttcgtgcttgatctcttatttttttatcgtgctcggcctgtttatcagccaatgcttgtttctcagtagagcctaaagttagccccttaaccttgtcaatggcgcgccatttttcctgttctgttaattcagcattatgctgaatgttaaagagtttttgacgttcatcttgaaattgaccttgtgagaagtcgttagcgtctttcttttcaggcttccaagtaaaagaatacccaatcactggtttcccgcggcctttaccatatttttttctaaccgttaggcctctaaaaagaggcgtaagttcctctttgatgggttttaaaacggattgatttatattgctacttttatagcttttagggacatctaatagctcgttaaagtctgcaactgaaaagtaagcgtacccagtagttctaaattgttttagtaaccgaaacatggtttttgcgtagctactttttaaatctctgaattctgataaagcataacgaacccaactttccagctcatttaataattttatagctttggggtaaattttaatatcaacataaggatcatcagcatggccgtttatctcaaattcggtaaacataacaaaaaattcacgatgcagcccatctttactacgtcttccaaagcgtaagcctaaaattttttgataagtactttcaatatcgtcaataaatcggttatttgctgtaggtttatatgcacttaattcttttaattgatcaaatgaaaaccttacagtttcgtcacccttgtcacgcattctagaaactattgagaagaataaattcatttcaacaggagtgaattttcgaagtgggattgtatttaattcaggatcatatttaacaatttcattactcaaatgaagcacctcttttaatgaatatggttttatgaatatataatactacaaaactctatctataaacagacaaaactctatctataaacagacaaaactctatctataaacagacaaaactctatctataaacagacaaaactctatccataaactcctgtattccctgggagagtaaggctcaagaggggtctaaaagaggtataaaagaggtttataaaagaggtataaaagaggcaccgctgtacaagatcaaaatctaaaacaaaaatacaaaggagtgagcccaaaaacaggctcacattaaactccactcgctacgcttcttgcgcctcacttcgttcgttgcctaaaaggtgcggcaagccacattaattcgggcgctgacgccccgaaccccgtccaagctgaaccagcttgaccgctttttcactcgccgttaggcaggaaagcaaagttttatagaaactttggctttcgccaattcagtgttaagactggtttagagctgtcaattccttatgctcccacgctacgctcgtccgctaccattgacagcaaacagttagtttttctgaatcttaacaagaatctaactgctatattcgtttttaagggccttatttatcgtttctagcgattttgagactgtttatatatatatttataccaaagcaaaaataaaaagcctcagcaggcttttagagggctaaataacaaagccaggacgattaataatatcttcttgtcttttttgcaaaacataagtatacagggaatcatacagattctttttgatctcgtcaggttcattgacagaagattcaaacaattcttgaatatcaacttgccaaggatcagcaagcatttcatcaattggttttaatactttcttttcgtccatcttgattactcctaacatcaaaataatgatttcagtttagatttacagattttacagtaccgttattccaatttttttaccaaactcataaagattctttgcacagaacgattaaaaaaatttggcttaaaacagcgtaatctgcaacactttttaaatatttaaaacataacaatcttagttaggggcaaacataaattgaattaaaaatacagtcaattcaacaacggaaaaaactgatttcatggttatcagcagaccgagtaaaacgaggtcaatgcgcacttacacaccacaattaaaatcgctggtgtttgtgctaaatttcctgtatcagaagtcgccgttggcgacaactaaaaatccaaataaaactaaccaaaatcaatttgatctaacatattttcggtactggcttggtctaagcctaaataagctaaagtcatggcttcactggaatgatttaataagtgcatgaccaaaccaatattataattagattgtgtgtagacgcgataagctccggttttgcgcattgtgtgggtccctagataattaattcctaacagatcgccaaccttactcataattttgtagaactgtttttccgtgatatggcgctcagggtgttgaatggaaggaaagagccactcagaggctagtctatgatcaagtagccattgacggtacaataagagctctgtttgaactggtttaagatacaaggtattcggtttaccagtttttcgatcgtgaatgaacgcattttgtttaatagaaccgtccggattaaaaatatcggcctgttttaagcgcatgacatcactgactcgcagcagtgtcgctttgccaacttgaaaaactgtatagttacgccggccagctttaaagttgttgagtaaggtatcttgaacctctttgagaacgtttgaatctttgatgggtaagacaacttgttgcatagttttagctccttaaaaaattgatttttagtacaaattaaagtacaatattaagtacaatgaaagggtggtaaatatgacattagcactaacacagagcgattttcgcgctaacctaaaaaaatatttagatcaagttaatgacgaagacgaaaccgtttatattgcgcgttcaaatagtcgcgcagtagccatcgtttcacaagaaaaaatggactggctagaaagagcattaaaagcgaaagaaggttcgttagaatatgcaattgcacgtgatcagttaattaaacgccatgt

SEQ ID NO: 30 - DNA, 5582 bp, synthetic construct
  source 1..5582: mol_type = other DNA; note = Lactobacillus plantarum PDA6 - Contig 30
gtgatgctccaaatttaggaataaaacgccccgattaaagcaatgatgtcaaatatgtcagaaattaagactttagagtcctaatatacttgactttacgtagaaaacttcctgcttaatctattatacagaaactttgacaaggataccaaatttcatcttaatattgttatcaactgtttcagtgaaagttgcacttaataaggtatttttgtttaatactacgatcaaagtttagcagcaactaaaaacagcttaaaatctctttgtcggtagcaaccagagcttatttgtataattctttaagcttttttcatttaattcaacttttaacaaatttgaatatctctaccaaccattctttagcaattttttctctgtcgttttcatttaattcaacaattccctgattttcttcacctgaaatgtctttttgtagtataactgccatttcagcctgtgttaattgaacgtaggaagctaatgttgatatagagtatgtgaaattaattgcgttccctgaatttgctagaataacagtcctattgcttttagtttttaaaattttatacccaccattgtgtccatagcggggtaatttgttgatcatttgactatttttaaaagtatcgtccgctgaagttacagaaaagctatataaagtatgtttcaaatccaatttttttagttgaagagtatcaatagacttctctccattagctatatacacaatatcaacgtcaattagctcagtatatatatcattagttatttggtacccatgggctaatgcgttagctaatcgtattgcccttttatcagcaactatgactattgcaccacgttttcttaaattacccgctatactggagccaactttaccatagccaataactagtactttcttgcctaaaagcgtcgttccataatctgctaaaaagatttcggatttgactacaatctcatgtccaaccaaaaaatcttcctcaatttttaaagaactccttgccactgatagtattgggactgatattgaattattggacagcttatcttcatacttttggtagccattttccgtatcctcgattattttaaccaattgacctttaaactgtttctgaatgtcacttaatcttggtacaaaatacccaccaatatcaataattgcaaacgtatcctgtccgacaattttctttatcaagttaggtgtatcaacgcctgctaattctttcctagaaacatctaatattgtacaagtctttgataaatgtttaaggactttacgatcgatacttttgggtttgggtataaagtacacttcgtagtgttcacataaatagtctataaaatccagactattaatcacggcgtgctctacgacaagaattttttggggatcagactgtcctttattaaaaagcgcagcgactttttcgaaatacgatttatctaatagatactcattatgtctcatcttttacacctgtttccatttggaattcagataagaaatcatgcatatactttgttcgacgactggcttcttgctttcccgttctggtattcattgaacttgctaatttcagcagcttttcataaaagtgattgatggttgtacttttgtgatggcgataatcatcgtgtgttttgatttccttcactgatattttgggatcgtatatttcctgtccagcgtgcccgccgtaagcaaatgcacgtgctatgccgattgcacctagtgcatcaagtctatcagcgtcctgaacacatttaccttcgttagaaagctggtaatggtgttcaatgttgtcagaatatgacatatgttggataatatctaaaatgtcttctctagccggagttgcaatattctcatggctaagtataattcgtacttctctcagtctattctttttatctgcagtgactttttcgtctatggtgtcatgcaaatagctagctgctttcacaacatacagaccaatatcagtttcatcttttttaaaatcttctgtatatattttttgagctaacttagccactctttgggcatgaagaaaatcatgcccagttggatcaaaggccatattttctttagaaaatgattttatatcatctaaactcattactctttatctcctttaattactttatttcgtaaagctatcaagcatagagaaattgtgaatacggcaacaaaaaacaaaatcaagaaattgattgataacccccattttgtccctgaaattacactcccttgttgtttctgcaataaagaaacaatagaggacgatattgcaattccaactgctcctgaataagcttgaaccgtcatataaatcgaattaccatcatttactaactcagcaggtaattgagacaaactataggtcatgatgttactgtagctaaagctcaatcccaccataaaaagcatatatattaaaaccagcccgccaatacttggtgtaaataggttggcgcccaaaaaggtcagtccaatgattatacagccacttataatgggtaagcggggtgcagttttatcgtaaataataccagcaaccaccgatagtactgcatcaatcacagcggcaggagcaattaggaaccctaccaagccaggtgactgggcaaaaagtatttgtagcacattagggattaagtatgacatactcaaagaactgaattgcaatagaaaaaaagcacttaacaactgcaaaaagcgtttgtttttaaaaagacttaattccaacaatttatggctcttatgcttctcattaagaaggaaaagtaagccactaaaaaaagctgttcctagtaaaaacaaatacaatttaaaagagctactattagcagtcaagttaacaataaacatcaacgtcgttgtcaaaaaaatggccaagcaaatgcctccacggacatcaaagggaacgtaatgaaccagtgaactttgttcaatgctaagctcaccaagcagccaagtaaccataataattggtattaaaattataaataggaaatgccaatttaatgtgtcctgaattatgccgccatatatgggacccactgctggtgcaaaggcaataactaagctacctatccccataaaagtgccaactttcttctttggtacttgatttagtatgacagcaaacatcaacggtaacgcgattccatcagcaatgccttgacataagcggcctagcaaaactaaattaaagctgttggaaaagcttgcaatcaacgtaccgactaaaaagcttaagcacgaaactctaaataaagttaccacacgaaaccgtcttaaaaagaatgaacccaatggaatcaaactagttgagactagcatatatccagtagtcaaccattgaacttgactgataggtatagaaaaatacgttgttaattgtgggaaggttatgtttaacgctgtttcaaccactattcctaaaaagcttaaaagaccaatcgaaattattgcgctcaatagtttgttgtgtttctcttgagccaagaattgcacatcctaaacactacatatagtttttcaccatatattgtaccactatatatggtgcttagaccgttgctcctacatattttcaagaacgaacaatagtcgaaagtcagttatggtcatgctataatgtgagtaagaaaaaaggaagccccgcgtgaacaggccttcccatgtagagccgtttaatacggcggcattaattaacgaccaaaaataaccgctagctgtgtcaagctaaggcggttatttttttgctgacttttgatcagctcaacaatcaatgcaattaaggctacgataaacataccgaaagccagcattaattgtaaagcgtccgcaacggacacttaggctactcctttcgttaggatttatgggctttaaaggtttaacaccataagcaccacccccttcaaggaaatagccaccgccttaacttctctacttgaaatattatacaggataaaaagtaatttacctactatatcattattaatttattggaaagcaagctttacattatagggctaaagtattacacttaatggaaagcaaactttacattaagaaaggaggatttatcttgttaaataatttggaaaaattacgaaaaaaaaacaagatcagtcaacaagaatttgcccagtatctaggagtaactaggcaaacaattagttcactagaaaatgcacgctacaatccttctattttattagcaatgaaaattgcaaggtactttggaaagagcgttgaggaaatttttatttatacggaggaagatgacaatgataaaagataaaggaaatgcggttaattacaaggaaattggtatttttgttttgggattactagtcattatattcattttgctaaaagtaattccacctagttttagatatggcattctgatagcagttggtatttctatgataattacgtctatgacaaagaaaaaggtagttgatcacgacgaaagaaattatcaaattgatcttagagctaaagcatttgcatttaatacacttgaggtggtatttggtctgcttttactaagttttagtatcatgcatgtaacgtttattactttagttttaactttgacagcttacttaattttaaaaatggttaatcttttggctttgtcttactatcataaaaaccattgacaatgcaaaaacacaccacatcttaagaatatttagctgacattaatttcaagaacgatactcacgatgaattggaacagctatcaactaaagcacttaataagtcttatgagagcttaaaacaacagattcaacaagcaactaatccacaaccaaaatcagaactaaaggatcagcttaatgacgtacaccaagaaataagcaaccaaggcaagatgaatcccagcaactaaaaagataaagagataaatcaaaattggcaagttttgtaaaagaaaagcgtataatctaaaaatataatacacaccaggaggtatcttatatgccatatttacgtgttcgtattgctactttggataacaaagtaccggcaagtgaaattgctcaaaagcttactagtctaacagtcagcgacttaaacaaagttactgacgtggatgctgttgatcttcaatacgtagatcctcaaacatggtttattggtggtaaatcactcacagaactcaatgaaactagtttctttatcgaaatcaagataactgaatccactaattcaagagaccaaaaggcacgctacattaaagacgtgtttaatgccatgtccaaatggttcgaaaatatctctactgctagttatgttgttttacaagatgtggccgctgattcctggggctatggtggaaagacacaggaatatcgctatatttctcaagataatagttaactcataatagccaacccaatcgactgctttaaaatagtcgaaagttaattaaagccatgctataatgtagacagaaaaaagaagccctgctggaacaggacttcccgtgcaagccgcttcaaaggcggtggcaagttattcaaacgataattttgtcgccctgcaa

SEQ ID NO: 31 - DNA, 4570 bp, synthetic construct
  source 1..4570: mol_type = other DNA; note = Lactobacillus plantarum PDA6 - Contig 31
cgttgagggcggtacggttgtctaggcttgatggacggccagtccggtatggcgggaagtatcctttgattcggtcccactgagcatcttccagttcgtatcgtttaggtgctgtcatcggaatgcctcgattcgtttttcctcagattatacctgaatttttagttttcagacagtccctagtagattatagccgttttttcatattaaaacgtctattaatttttattctttactgtgctgccaattaacatggtatcttttgcgttgataactaaagccctctccaatcacttcatgggcatccagtaccgtcacaaatgcccgttcatcaatcgctttaattaattgcttcaattgtggaatttcccgcggttgaaccaccaaataaatcacttgcttttgatcatgctgataaccaccttcagcttgcaaatatgtcaatcctctatttaaagaaacatcaattaattgggaaattttttggcttttatctgatacaatgaataataccttagcacgattgggcccttcttggaccatatcaattactttagataatacgaaactaacaattagcgagtacgcgatgtgatacagatctaagtatgatagtgatagccctaatactacgtagtcaataatcaaaattccttttcccgaagaaaatccaaaacttctctggccaacccgagcaataatatcactaccaccagtagttccgttataacgaaaaaccagaccaattcccaaccctgataatacccctgcaaccagtgatgacaataataaatcatttctcaatggtagtggttgaatcagagcctgctgtgaccatattattagaaatagtgataaacaaatggtgccataaatagtgtaagccatcatgcgcttgcctaagtagcgcaacccaattagtatcaatggaatattcagaaataaagtactaatacccaagttaatatgaaagaaatgacgaataatcagagttattccgctcagaccgccgtctgccaagccacttggaatagagactaaatctagactgaacgcataaatgctacatcccaacgtaatcataactaattcgaaaccattgtattttgtccaatctttaaaaaacatagttcatctccaaaatgttttatcaatgtaagtgctttattatttgaccgatggtccctaaaaaacactaacttgtcctgtaggccctagctattcacttcccttttgggagtgcctaagtctccaacttttaaagcatattctttaataccttgaaatgtcaaattaagttagaaataacatagctgtttatctgtgatgttttccatgaatacctcaattggtgttttataatttaatgattttcttggaatatgattacgccggctactgacttgttgaactaaagcatttggtaaattgcgaaaatccatgctcttgttgagaccatctcgtctaattagtccattgttattttcgtttaagccacgctggttaggagccccaacttcggcaaaataagtactaatatcatgcttatttgcgatttctttccaaccaatgaattctttaccattatcaaaagtaattgacttgaaaaggtgttttggctgttgggacaaccattgattaagatgtttattaacgcattcagccgatttctgttggatgtttaaaatgatttcaactttggagagacgctcaactaaggtcataactgcaccttgatgtgctttgccttggacggtgtctgcttctagatgaccaaattcatgttgaaaatgaggataatcctgatagcgttgataaatacttctgccgagtcggccagctttaccacgccgttcaacgtaaccatttggatgccttttacctttcattggcaacaatttcacattgaaaatatctctttgaaaaagtcgatataaggttctcatgctacaactgatctgcaaaacacagttgcttttcttcgtatttaggattagtattttgcaatgctatatttcaataattaacgttgggggcaagcaaatatgaataagcaactagaacgtgtttcttttgcgggggcacttgttactttaggaattgtgtacggtgatattggcacttcaccattgtatgttatgaatgcattgattggtgacgccggtaaaatgggaaatatttctcccgattacgtgattggatcgatctcgttgattttttggacattaatgatcattacaacgttgaagtatgttgtcattgcaatgcaagccgataataagcgtgagggcggaatttttgctttatatgcattggttcgaaaaaattcaaaatggttaatttggccaaccttgattggtggggcggctattttggccgatggaacattaactcctgcagtaactgtgacttcagccattgagggattaaaaaaacaacaccttggccctgtggtgtttagtaattctcaacataatgtcttgattatcacaacagttgttttactcgtattatttatgattcaacgttttggaacaggtgtgattgggaaatcctttggaccagtgatgattttatggtttggctttttggctgtctttggaatcgttaatctaatcaattatccaatgatattgaaggctatttctccctattatgcaattaagatactcttcagtccagttaacaaagtgggaatctttatacttggaagtatctttttggcaaccacaggagcagaggctttatattccgatatgggtcacgttggcaagaagaatatttatgtaacctggccactagtatatagcaccctatttttaaattacttaggtcagggggcttggataattagacatgcaggtgacactgcttacaggcacttatcgaacttaaatcccttttatgaaatgctcccagggccttggcgcctagttggcattttgctagccacactcgctgcaatcattgcctctcaggcgttgattacgggttcttacactttagtcgatgaagcaattggcttaaaatttttacctagaatggttattagacatccaagtaatataaaaaatcaaatttatattgcaactgttaattggatactatgtataataacaatcagtgtagtctggttctttggtagctcacaaaaaatggaggctgcgtatggtttagcaatcactattaccatgcttatgactaccgtgcttttgcatgaatttttaaataaacacctaaataagggaacggcgcttataattgccttgttttttggttttattgaactaatctttctaatttcaagtttggttaagtttattcatggcggttatgttaccttaacaatcatgttgggtattctttatattatgtggctttggtactttggaaataaacgaagagaacattatgaaaaagaaagcgagtatgtttcacttcttgactatcgtgatcaactctctaaattaagcgcagacaatacaatacctttgttcacgactaacttagtgtatatgactaagattaagggtgattaccaaattaagcgtagtaccatgtattctattctcgacagacaacctaaaagagctaaagtttattggtttgttacagtcaatgaaaccaatgcaccttatgaaagtaattatacagttgatttacttgagacgcataatgttgttaacattcaattgtacttagggtttaggaaatctcaatccgttagtatctatttacatcaaattgtaaatcatctagtggaacaaggtattttagagccacaaatacccacatattcaacagagcgacaacggaaagtcggcgactttaagtttgtcattataaaggaacaaccagcagatttaattgtcaatgatcagttaagctcgttagatagaagattgattgggggacgcatctatttgcagaaaattacggcctcacctgtttcatggtatggtttggagtttagcaatgtcatagaagaaagttccccgttatttattactcaagatcgggatcagtacttaattcaaaagaaaatttatcatcgaggtagcttaagtaagaccgaaaagtgaatatgtagcagtttaagtgcgacaaacaagttaaaaaaattatatttaattttaattaatgacctgatctcagtattttactgggatcagatcattttttgttcatcgaaatacgtttagtgttttactataacacgtctttagcaacaacttgttaaaatctcccggtttgtaaaattaagttaatactaaaaaagccatttgtggtaggcttttgagcataaaaatcaaaagtctaccacaaatggcctacattcagtttactgtagacaaactcaccacgatttatttcttttggaaagccaaggtaaaaacttatacggattatgttgcttggcatacagtttaccttcttacgtgcgcgtgacgatcatatcagagagcgtaaaatatcttgtgtaaatgcataaaagatttctgaattgtatagaaatagggaatgccttcccttatgatatttagtaaccacagaaaacatcataggaggc

SEQ ID NO: 32 - DNA, 3629 bp, synthetic construct
  source 1..3629: mol_type = other DNA; note = Lactobacillus plantarum PDA6 - Contig 32
attagagaatttgagaaaagaaaaactgaacctgtagaaattcaaagaaaacttttacatgttttgagaaattttatttttgatgaacattgttaaggtattattttttttgccagcggcaaaaccggcctcgcagagcccaaactttacaaggtaaagtatattgggctataccttgcatggaggttttccgaattctgtgctatgctctaaccaaatttatctgtttgggaatggagtggtgaaatgagttatttagtggctaatatgcagaaattaaaagctgataatttagttggcttgggtaatcatgatcaacgccgaacgcaacatcacaaaaatattgatattgacgttgaccgttctggcttaaattatgatttagttgctggtcggactaaccatttcaaaacggatattgaggcttatattaacgagcataaaaccagtcagcgagcggtcagaaaagatgccgttttagtcaatgaatggattatttcgagcgatagtaatttctttgccgatttgacggcggctgatacccgcaaatattttgaaacagcgaagaattattttgctgaaaaatttggtgaagaaaatattcgttatgcaattgttcatcttgatgagagtacgccacatatgcatatgggaattgtgccctttgatgatgaacataagttgtctgctaagcgagtatttaatcgcacggctttgcgagatattcaagatcaattaccgacttatttgcaacagcatggttttaatattcaacgtggggttcaagaatcggaacgtaaaagtttaacggtgccagaatataaagctatgcgggaagatttgaaaaaggcgacgcttcaaaaacaagaaatacaagctgaacttgaagatgccagaaaacgccttgctgaacttaaacctcgtgatcagcaggaaattgagagcaaacctacttttttaagcaaggataaagtggttgttagaaaaagtgatcttcatgacttagaatctcgagcagctgtcagtgatatttataatcaacaacagaaccgtttaaaacttgataatcaaagcctaaattatcaactgcttgaagttaaagacaataattatgatttaagcaagaaaaatgagaagctccaaaaattagtggatacgttacaaggaattgttcggagcgttgaccggttcttacagcgcaaattaggtgttggcttaccaaatgagtggctagagcgagctggactaaaggaactatctaaaaaagcccctcagaggccacaggagcgttcagaggggcaacatgatgaattagatggtccaagcctttgaatttggtctatggctttaatttaaccgctgatgagtattggagctgtttaatggccgtcagtcaacggtaaatcgaattaaagggacttactgctttagcagttagtccctttttgaggctttaaggagttgattgactaaccaaacccagacactgaattggctgaaagccaaagtttcctaaactttgctttcctgcctcacggcgagtgcggggtgagtttgagcgggagctcccgctcatttaggcggtcaagctggcacagcttagactgggttcggggcgtcagcacccgaggggttgaaactggcgtttttttgccagtttcttcttatcttgatactattagaaacaacgtcattttaaaaaatcgggataaacccttgacacaactgggcttaggcgtattatgagtttataaaatgaatataaaaaaaacccacgtgagcttcgaaagtttggcgacctcgaacacgtgagttaatcttgtaaaatcgtatttttatttactagacatagtttaaggcttgggtagttgaccgtcaaggcttctggctgattttagtaaagtaatacatgcagattaactcttctcacgtggccagatgagaggagttttattttgactgatagaaaagttttagttgataaatctcggtcagggaaagttcgtccgtggcgagagcgtaagttagagaatttgcagtatggtgactatttgcaaatattgaattataagaaagctcaccgggttaaagaatgtggggaagttttgcgctttgtggaagatgaacaaggtcataagaaattagcgcagacttggttttgtcattctcgtttgtgtcctttgtgcaattggcggcgggcaatgaagcagtctaatcagttaacgcaaattttggcagaagcagttaaacaacgaaaaacaggtcggttcttatttttaacgctgacggttgagaatacaactggtgagcaactaaagagtgaattacgacaaatgggacgggcaattgcaaaaatttttcaatataaaaaagtggctaaaaatttgctgggctatgtgcgttcaactgaagtgaccgttaatcatgaagtagatcagccgatgtatcaccatcatatgcatgtcttgctttttatgaaatcaagctattttacgggaactgataattatatttcacaggcggaatggactggatattggcaacgagctatgaaattaacttatgtgccagttgtgaatgttgaggcagttaaaccgaatgtgaatcgccataaaaattctttattggccagtgctcaagaaacggctaaatatcaggtaaagtctaaagatattttgacgcataatccagaacaagacttacaggtgattgacgatctggaacaagctttggctggttcccgccaaattagttatggtgggttactgaaagaaattcgcaaacagttgcaattggaagacgttgaaaatggtgatttgattaatacggatagtgatgatcaaaaggttgatcaagtggtgcgtgagattattgctaaatgggattatcagcgtaagaattattttgtttaatgatttattgtctatattataagtgagggggaaagtgattgctttgagctttttttaatttttgttcggattaattatagaatttaccaaataaaaagactattaacagttcgaaaaatattaagggaagtttcaatggtaataatatcgataattctagtgtcaatgttgataatagtgaaggtgagaagcatgaaaaaaggtaatcagaccagtcaagataattgttctaatacttcttctggtaattttaacggtaatattattagtaattctgatgtaaaattcatttctgaagttacaaattatactgataattctaatatgtttgttgttttgcaggaatttataaatattttttttgagaaagctggagcacttcataataaaattggagaatatgccggtaaagattctattcctgatttgaatagtgatttactagctttgagaaattttgttgaaggaactcttgcaattccaaatagtattcttgaaatagtggataaaatcgtgcaatcgttgttcgcttactatgaattgatagctactcgaggatctggtaataatcttagaaatatgagtgctgatcaaagcgatgattatattagagaatttgagaaaagaaaaactgaacctgtagaaattcaaagaaaacttttacatgttttgagaaattttatttttgatgaacattgttaaggtattatttttttt

SEQ ID NO: 33 - DNA, 2893 bp, synthetic construct
  source 1..2893: mol_type = other DNA; note = Lactobacillus plantarum PDA6 - Contig 33
ttaggtaaatgaggttaagttaacaagggcgcatggtgaatgccttggcactaggagccgatgaaggacgggactaacaccgatatgcttcggggagctgtacgtaagctatgatccggagatttccgaatggggcaacccagcagttttaatcaactgttaccactagatgaattcatagtctagttggaggtaaacgctgtgaactgaaacatctcattagcagcaggaatataaagaaatttcgattccctaagtagcggcgagcgaacggggaacagcccaaaccaaagtgcttgcactttggggttgtaggactgaacatttgagttaccaaagaacttgatagtcgaaggatttgggaaaatccgccatagatggtgatagcccagtagattaaatcaaattctctcagttcaggatcctgagtacggcggaacacgtgaaattccgtcggaatccgggaggaccatctcccaaggctaaatactacctagtgaccgatagtgaaccagtaccgtgagggaaaggtgaaaagcaccccgggaggggagtgaaatagttcctgaaaccatgtgcctacaataagtcagagcgcgttaatgcgtgatggcgtgccttttgtagaatgaaccggcgagttatgatcccgtgcaaggttaagactaaaaagtcggagccgtagcgaaagcgagtctgaaatgggcgttttgagtacgaggttatagacccgaaaccaggtgacctatccatgtccaggttgaaggtgcggtaaaacgcactggaggaccgaacccgtgtaagttgaaaattgctgggatgaggtgtggatagcggtgaaattccaaacgaacttggagatagctggttctctccgaaatagctttagggctagcctcggaattaggatcatggaggtagagcactatttggactaggggcccgtcttgggttactgaattcagataaactccgaatgccattgattcatatccgggagtcagacgatgagtgataagatccaccgtcgaaaggggaacagcccagaccatcagttaaggtccctaaatgtatgctaagtggaaaaggatgtggagttgcatagacaactaggatgttggctcagaagcagccaccatttaaagagtgcgtaatagctcactagtcgagtgatcctgcgccgaaaatgtaccggggctaagcatactaccgaaaccatggatgcgaccattaggtcgcgtgataggagagcgttctaagggcggtgaagcaagatcgtgaggacttgtggagcgcttagaagtgagaatgccggtatgagtagcgaaagataggtgagaatcctatccaccgaatgactaaggtttcctggggaaggctcgtcctcccagggttagtcgggacctaagtcgaggccgagaggcgtagacgatggataacaggttgagattcctgtactagttaagtgcgtttgagcaatggagggacgcaggaggctaagatgtgcattctgttggattagaatgtccaagcagtaagtcttgtgaagagtcaaatgcttttcactttaaggacaagctgtgatggggagcgaaatttagtagcgaagcgtctgatgtcacactgccgagaaaagcttctagtgagtacttaactacccgtaccgcaaaccgacacaggtagtcgaggagagaatcctaaggtgagcgagtgaactctcgttaaggaactcggcaaaatgaccccgtaacttcgggagaaggggtgctgatcgcaagatcagccgcagtgaataggcccaggcgactgtttatcaaaaacacaggtctctgcaaaatcgtaagatgacgtataggggctgacgcctgcccggtgctggaaggttaaaaggatgggttagcttcggcgaagctcagaattgaagccccagtaaacggcggccgtaactataacggtcctaaggtagcgaaattccttgtcgggtaagttccgacccgcacgaaaggcgtaacgatctgggcactgtctcaacgagagactcggtgaaattatattgtccgtgaagatgcggactacccgcgacaggacggaaagaccccatggagctttactgtagcttgatattgagtgtttgtacagcttgtacaggataggtaggagccatagaaaccggaacgctagtttcggtggaggcgttggtgggatactaccctcgctgtatgaccactctaacccgcaccactaatcgtggtgggagacagtgtcaggtgggcagtttgactggggcggtcgcctcctaaaaagtaacggaggcgcccaaaggttccctcagaatggttggaaatcattcgcagagtgtaaaggcacaagggagcttgactgcgagacagacaggtcgagcagggacgaaagtcgggcttagtgatccggtggtaccgtatggaagggccatcgctcaacggataaaagctaccctggggataacaggcttatctcccccaagagtccacatcgacggggaggtttggcacctcgatgtcggctcatcgcatcctggggctgtagtcggtcccaagggttgggctgttcgcccattaaagcggtacgcgagctgggttcagaacgtcgtgagacagttcggtccctatccgtcgcgggcgtaggaaatttgagaggacctgtccttagtacgagaggaccgggatggacatacctctggtgtaccagttgtgccgccaggcgcatcgctgggtagctacgtatggatgtgataaacgctgaaagcatctaagtgtgaaacacacctcgagatgagatttcccattcctttatggaagtaagacccctgaaagatgatcaggtagataggttagaagtggcagtgcggtgacgc

SEQ ID NO: 34 - DNA, 1854 bp, synthetic construct
  source 1..1854: mol_type = other DNA; note = Lactobacillus plantarum PDA6 - Contig 34
catgctataatgtagacagaaaaaagaagccctgctggaacaggacttcccgtgcaagccgcttcaaaggcggtggcaagttattcaaacgataattttgtcgccctgcaacctaccaaagttgagcagggcggcttttttatttgttccttttgtcgatgtatgttaacaacgctaaaacaaacattgcaaacagcaacatcaacgagagtgtctggaagacgctcattgactgtgaaaccttcctgaagattcttccatgttcccatgggcctcacctcacaaggaaaacgacagccatcgcccttaaaacattctaagctttatagtgaatcgattatccgacgggatagttgattcactattttagttttgttctaaactttaaatagtggtgaaactatatgccgtaagaagtttagacgcttgacgtcgtccttaaaacaggcaattttacttagtagttagtattctcttcgaagaatgtcgacacttgatgtccagtttagaaaattagaaataattaccttagtaaatacgttccaaccactaacagctatttaggagggtttaaaaatgagcattgtctttggcatagatgtaagtagtcgtgattccagtgtttgtgtacttcagagtggcgtcacacgagaatataagatcactaacgatactatcggctttaaaactctattgatagatctaaaagaatacgccgaacatccacaaatcatcttagaagcaactggaatttattcacgcagaattactagatttttagatgaatacgattatgattatgttcttcttaatcctttaaaggctaagaaagaaattaatcagggcttacgtcgcaataaaaccgatcgcaatgatgcttaccatttggcactagctcaagatcgaaatcagcatcaacctaatcgaaaagagcctgaggcttatcatcaattgcaatctttaagtcgggcttatgaagaattaactcacgatattgtttcttccaagaatcgacttcataaatatttacagttaacttttccagaattagaaaccattttcaataactctagaggagttaattactggtatttagttgagctctttccacactgccaagatgttagaaatcttgacgtatcaaccatcgctaagcaaattaaagattttaaaggttatggtattaaccgtgctcaaaaactagctattaaacttaagcatctcgcggatttagcttatccagcagtcgatcaagacgacccagagcgtgatgaagtggtttattacgccaatagattattacggcttacagctgatcgcgagcggagatcagaggcaatgattaaattagctaagactttgcctaatcgtgatctagaaatcttaatgagtattcctggtatcgctgaaataactgccgtccgaattctagccgaattaggcgacattagaagattcagtaatccaaacaagataaatgcttttgttggtattgatccaggtagatatcaatcaggggaaaaagattctagtttaaggatctctaagcacggcaatgctgttgcgcggaagattctttatcgtgcaattggacaaatcgatctagcggctaagactagtccatgtcatatagcagattactatgaacgaaaaaagcaattttctcaaacaaaggggttcaagaaaattgccattgcttcaatccataaattgcttagaacggtctacattttgattatcactgatcaaatgtatgattacaacgtagccaacaataatcaaaaagacttttgtcgtaattaattgatcatgttcattatagcctaggttaacttcaaagaagtaatttctttg

SEQ ID NO: 35 - DNA, 1655 bp, synthetic construct
  source 1..1655: mol_type = other DNA; note = Lactobacillus plantarum PDA6 - Contig 35
ctacctaaggaggagtttttctatgggcagaaaaggttctcgctatacgattaaagagaagttgttttacattggtctagttactcagggaatggctcctaatgccgttcaaagaaaatatggagttgaacatagtcaagtaagccgatgggtaaagcgttatggattacaggggatcgatggcctgcggcatcgactcatgggaaagtatccaagtgaattgaaattaaaaatagttctggagtacctagaaggacacagttcttatcctcgattatgcgataaatataatattcctaacgttagtactatctatcaatgggttcatcagtatactagtggtaaacaactcaccactaggagtgtgaaacaagtgaaagatggtcggaaaacaacccagctggaacgtgtagaaattgttcaatggattatagcaaacgatatggattactcacgcgccatgaataagtacaacgtgtcatatggtcaggtttactcgtggactcggaagtttaaacaaggtggaccagaagcccttgtcgatcgtcgtggtaagggaaagactgtgcatgaccagcttacagataacgagaagcgtgacctggaggtcaagcgtctaaaggcccgaattgaacatttatcgacagagaatgcagttctaaaaaaactccaagaattggaaaggttggatgccactcatcacacatctacgaaacaatccaaactttagcaactacggtgaaccctgatacaaaccaagtttatgggattagttttatgtgtcgttttatgaaagtctcacgtgctgcatattacaaatggatacaccgaaccccaagcaaacgtgctctggaagataaagagatattaaagtacgtcaaaattattgaagaggagaacgaatatacccttggagtacgaagattaatgatgaatcttcattgcgatacaacatatcgaactagtgctggaaaaatgcgccggatcatgcgtgaaaatggtatcgtggcttcaattcgcgtggcacagcatgatcgaaaagctcaacggaaagagcacatcagcaataacctcctcctttcagatgaaggccataattttaagccagacaagccaaatcaggtctgggtaactgattgtacagagctatgttttggttggaaattcagtgaacgtttgagacttagtgcaattaaagacctgaacgaccacagtatcattgcttgggacattgaagaaactgagacagccgatttggtgactcgaacatttgataaggcattagcaataagcaatggtgcaaaaccaacggttttacactcagatcagggatcaagctatacatctggagtatttaacaaacatctagctagcaatggggttaagcatagtatgtcgcgtccaggaacccctggagataacagtcctatggaaagcttctggagtcatatgaagaccgagttctttaattttcaccatgcattaaatcgagaagaaatggttcaacttatcgaaaaatgtattaactggtataactacaagcgtcgccaagaaacactaaatggcatgaccccgaaagaatttcggaatcatgccattctaaaaactgcatagctattttaattatttgaactgtctacttgactcggagcagt

SEQ ID NO: 36 - DNA, 1373 bp, synthetic construct
  source 1..1373: mol_type = other DNA; note = Lactobacillus plantarum PDA6 - Contig 36
ttgaaagatggcttcggctatcacttttggatggtcccgcggcgtattagctagatggtggggtaacggctcaccatggcaatgatacgtagccgacctgagagggtaatcggccacattgggactgagacacggcccaaactcctacgggaggcagcagtagggaatcttccacaatggacgaaagtctgatggagcaacgccgcgtgagtgaagaagggtttcggctcgtaaaactctgttgttaaagaagaacatatctgagagtaactgttcaggtattgacggtatttaaccagaaagccacggctaactacgtgccagcagccgcggtaatacgtaggtggcaagcgttgtccggatttattgggcgtaaagcgagcgcaggcggttttttaagtctgatgtgaaagccttcggctcaaccgaagaagtgcatcggaaactgggaaacttgagtgcagaagaggacagtggaactccatgtgtagcggtgaaatgcgtagatatatggaagaacaccagtggcgaaggcggctgtctggtctgtaactgacgctgaggctcgaaagtatgggtagcaaacaggattagataccctggtagtccataccgtaaacgatgaatgctaagtgttggagggtttccgcccttcagtgctgcagctaacgcattaagcattccgcctggggagtacggccgcaaggctgaaactcaaaggaattgacgggggcccgcacaagcggtggagcatgtggtttaattcgaagctacgcgaagaaccttaccaggtcttgacatactatgcaaatctaagagattagacgttcccttcggggacatggatacaggtggtgcatggttgtcgtcagctcgtgtcgtgagatgttgggttaagtcccgcaacgagcgcaacccttattatcagttgccagcattaagttgggcactctggtgagactgccggtgacaaaccggaggaaggtggggatgacgtcaaatcatcatgccccttatgacctgggctacacacgtgctacaatggatggtacaacgagttgcgaactcgcgagagtaagctaatctcttaaagccattctcagttcggattgtaggctgcaactcgcctacatgaagtcggaatcgctagtaatcgcggatcagcatgccgcggtgaatacgttcccgggccttgtacacaccgcccgtcacaccatgagagtttgtaacacccaaagtcggtggggtaaccttttaggaaccagccgcctaaggtgggacagatgattagggtgaagtcgtaacaaggtagccgtaggagaacctgcggctggatcacctcctttctaaggaatattacggaaacctacaca

SEQ ID NO: 37 - DNA, 1274 bp, synthetic construct
  source 1..1274: mol_type = other DNA; note = Lactobacillus plantarum PDA6 - Contig 37
ttgcagggcgacaaaattatcgtttgaataacttgccaccgcctttgaagcggcttgcacgggaagtcctgttccagcagggcttcttttttctgtctacattatagcatgacctttaaaaactggccaacgttttagactttgatcaagttcgggttcgggttgtttgatctccggattctgttcagcaaatgcttgcagttgtttttgagttcgattgctgatttcctgttgtacatcatttaactggttcttaaactgcactttttgttgtggactagttgctcgctgaacttgttggttcaagccttgataaggctgatttagtgcctgggttaacgtaactaataatgttaatgaatctgagattagtctgagatcttcagtgttattcttatttttagtcggtaccctagttgcttggattaattttgtaacgatttatttgaagcacaaaaaggactgattatatgggtaattcaaattaataacattaaaataaccccccaacatctacactatagatattgaaggttattttaacaatgttctttgaggggttgtttgtaaaatggaccccgaaactcgattttactttctatgcttaataaatggcagtaagacaagttggatcaagacgataaaaataaaggaaaccactagcacaataaaagtagctaatttagtggctggcatttgactggtttcagcaccatcaacttctctgataaaagtcacaaaatttaatatactgaaaatgactagtcaaacaagattgcttaaccacccaacctttttaagataatcacgtaaagtatttttgattaacgaagtatttagagacgctttcacttcagtaattgatcttaacttgttcgttctcctaccgctaaaattcgtataggtgttccattggccccattacatggattgattacattctgcaattatctgtcacaacaggtatcaattattatccagcaccttatctttataataatcaaaccaagtcaccttgcccgtaataatcgccgtttgcccaatcatcccgtagcgtagtaactgtgcctgatcggctgtaatcggaacgaccgctgtcacttcataaaaagtcgctttactctcctcgactggtgagaccccaatctttgtgaccacaccgcccaaaataattggcttcggtacgttccgcgtgactttgaatctaatggcttgcttgactttaacggaagaaatatccgccgtcgaaatatatagcttaacgttcactcgcc

SEQ ID NO: 38 - DNA, 975 bp, synthetic construct
  source 1..975: mol_type = other DNA; note = Lactobacillus plantarum PDA6 - Contig 38
cttaccacagaaattatcgctgcactagcccaaaagcaagatttggacgaagtttttcgtcaccacctcgaaattgcgattaaccagctgcttcaaaccgaattggcagagtttttgggttacgaacgctactcatacgctgggattaacactggtaataaccgcaacggcagttatgagcgctcgtttgatacgaagtacggccaacttaacttaaccattcctcgagatcgcaatggccggtttgaaaatcataccttgccagcctacggtcggcacagtgataatttagaaacaacggtcattcagttgtataccaagggaattaccactgctgaaattgccgaactcattgagaaaatgtacggtgctcactactccaaagccacggtttccaacatgactaaagccgtcaatgaacaggttcaagctttccagcaacgtcgactggcttcacaatatgcggccatcttcttagatgccacttacttgccgttaaagcgggataccgttcaaaaagaagccgttcatattgcgattggcattcgtccagatggtacgaaagaagtgctgaactaccaagtggcgccaacggaatcgactggaatctggactgaactgctgggaaccttgatcaagcagggcgttaaagatgtgctgttgtttgtggccgatgggttagttggtttggatgaaggcttgaatcggcatttccctaaagccaaacgacaacgttgcctggttcatgttgggcggaatctgatgaacaaagttcgcgtaaaagaccgcaaggccgtgatcagtgactttaaacaagttcatcgggccgccaaccgtgaagcagccgaactgaaactgaatgagttcgccaacaactggcatcagacctatcccaaattaatcaaagatctgcttaaaatgccgaatttactcactttcatggactttccaccagctatccggcaatcactatac

SEQ ID NO: 39 - DNA, 882 bp, synthetic construct
  source 1..882: mol_type = other DNA; note = Lactobacillus plantarum PDA6 - Contig 39
agaacgtgtttagaatcttttcaagagtattcgcaggaaggctaagctaatcatcatcttactggtgttcagctttcgctcacaattgcgccagaggcgccgatattttcctagccagctaaaactgcgttcgataacccagcgttgcggggtcacttgaccgtgcctaaggtcactctgtttagcaataatgacttcagcgttaatcattgcctgaactgattgagcaaagttgttaccagtataaccaccatcggccattactcgttgaaccaggtcaaactgtgatttgtttaacgccagtagcgcattggcgccatcacgctcagaaacattggcggttgtcacatggactgccatcggcagcccattgatatctacagcaagatggcgcttaatcccactcacctttttaccaccatcgtagccgctactttcagcaggatcggtattcttgacactttgagcatctagaatgacgaacgatgtataaactgaacgcttctgagccaaccgatgttggctgacaatttttttaaaaccttatccagaggagtgataccagcaggagatggcgttttagtccaaagtaaccagtaataatagacggtttcccatttaggaaaatcgctgggtaaatcgcgccaaacgcacccatttttcaaggtataaagcagggcacaaaagatatcatataaatcaacctttcttggcttagtccgcttacgtatgccttctagatctgtccggattagttcaaattgttcacgagagatgtcgctactataatggtgtgcaaagcttttcatggattaaaaactcctgtttttgatctaatttaactaaaatcaaatcgaatgtcaaagtatccaaacacgttct

SEQ ID NO: 40 - DNA, 736 bp, synthetic construct
  source 1..736: mol_type = other DNA; note = Lactobacillus plantarum PDA6 - Contig 40
tcgatgttcttaacgttgaagccgttcaatatgacatcaccactatttggttgataaaaatcaataagcaatttaactaacgtggacttgccagagccactcatccccacaattgcaaccttatcatgttgtcgaatcgtcaaattaacatcatctaagacattttcaccgtaaccataacgatagctgaccccttgtaacttaatatcaccatttaattgactttcattatgaattggccgtgacgcctcaaattcactagcgaccaaatacacttcatttaaccggttgttagcgaccttagcgctttgaagcttagtctgcaaattaataatattctgtagtggattaacaaaataggctaataaagcattatatgtcatgagctccccaactgataactgattatgaatgacgagattggcgcccacccatagaacaacaacttctaagactaactgtataaacagttttaatgcctgttgcaaagtatccgctttaagataggctaaactcttacgtagataatcaacaaattctgaatcaattttctgataacgttccgtctcaccattcagcgccttaacagtttcaatcccatgaagatcctcaataatggctgaactcaaaatagcattgctttccatttccttttgattcaatcgttcaaaggatttattaaaggctaagatgacaaccgcgtagattggcaacgagagtaacgtaatccaaaaaa

SEQ ID NO: 41 - DNA, 697 bp, synthetic construct
  source 1..697: mol_type = other DNA; note = Lactobacillus plantarum PDA6 - Contig 41
cgttgcaatcctacgaaagttcttcaactgattgaagaagttctcaatcaaatggcgctcacaataaacgtggtaatcacaggtccacttgtctttggtattttcctttggcggaatggtatagacgcctgctttatcttcaatatactggcgaagtttcgcggtgccataggctttatccgcgataatatttgattgagaaatatcgaagccttccagcaactcactggcaacttggctatcatgtacttgaccacctgttaggcgaaaacccaagggattccctaatccgtcaacgagtgcgtgaatcttggtcgttcggccacctcgacttaatccaatagcttgattttcgaccatacattcggcattttttttgccccagtggccttttgatgcgctcgaacgatcgttgaatctaagctcaagttttccatgtcgggatcgtcaatcaattcgagaaaaacctgttcgaacaagcctgaacttacccaggctcggaagcgactatacaccgttttccaagagccatagcgttcaggtagatcacgccaaggagccccgctgcgcatgagccagaggatagcgttgagggcggtacggttgtctaggcttgatggacggccagtccggtatggcgggaagtatcctttgattcggtcccactgagcatcttccagttcgtatcgtttaggtg

SEQ ID NO: 42 - DNA, 613 bp, synthetic construct
  source 1..613: mol_type = other DNA; note = Lactobacillus plantarum PDA6 - Contig 42
aaaacgcatgtcgtgattgctgatccggacccaacagttgcggttatcagtatgtcaaaggaacggtttgaaagcgaatggtccggagttgcccttttctttgcaccgaagtcggaatataagccagttaagcaagataagggctcactatggggatttattccaagcttattaaagcagcgccgactggttattaatattgtgcttgctgcagttttaatcacgattattagtatctgtgggtcttatttcttacaagcggtgattgatacttatattcccaataatatgcacagtacattggcagtggtggccattggtctaatcgttttttatacctttcaggctatctttacttatgcccagaattttttattggcggttttaggtcaacgactttcgattgaaattattttaggctatattcggcacgtctttgaattgccaatgagtttttttgccactcggcggacgggggaaattgtttcaaggtttacggatgccagtaagattattgatgcgttagctagcacaattgtttcgctgtttttagatgtcagcatcgttattattatgggggcaatcttggtaatccagaatatgacactttttt

SEQ ID NO: 43 - DNA, 547 bp, synthetic construct
  source 1..547: mol_type = other DNA; note = Lactobacillus plantarum PDA6 - Contig 43
caccgagggttcaaaggactccaggacaccttggaagcatcatttatttaagttagatacatattatatgtacgaaggcatttcatttacacaagattcttgacactccctctatttcgtttagtatcctttactatatataataaggaggtctctaatgctagtttttctgtcaacatcattcataccatccaatgataagatgtggtcacgagttggcataaataaaaatcaacaattcccgccattggcaatagatttaggatgaccttcccttaattttgaatggtgtccatggtcttagttaaatttttcttgtttctgcccaattgattcaattcagtaactatgacaacaccaccttaacaaatcataatttggataatagtatgttccatttgaaagctaagccttataattagcatagggttaatagctctaatcaaaatacccacaaaaggcctgctcaactaacaattgagtaggccttttgtagtacaaattaatccttatcacaactaacctcaatagcacaacaggtataaat
